(19) United States
(12) Patent Application Publication
(10) Pub. No.: US 2023/0183319 A1
(43) Pub. Date: Jun. 15, 2023

(54) VARIANT ACTRIIB PROTEINS AND USES THEREOF

(71) Applicant: Acceleron Pharma Inc., Cambridge, MA (US)

(72) Inventors: Ravindra Kumar, Cambridge, MA (US); Roselyne Castonguay, Cambridge, MA (US); Brantley Herrin, Cambridge, MA (US); Rose Maria Silva Garcia Grenha, Cambridge, MA (US)

(21) Appl. No.: 17/797,238

(22) PCT Filed: Feb. 3, 2021
(86) PCT No.: PCT/US2021/016434

§ 371 Date: Aug. 3, 2022

Related U.S. Application Data
(60) Provisional application No. 62/969,635, filed on Feb. 3, 2020.
(60) Provisional application No. 63/074,742, filed on Sep. 4, 2020.

(51) Int. Cl. C07K 14/71; A61K 45/06; A61K 38/17; A61P 13/12; A61P 29/00

(52) U.S. Cl. CPC C07K 14/71; A61K 38/179; A61K 45/06; A61P 13/12; A61P 29/00; C07K 2319/30

(57) ABSTRACT

In certain aspects, the present invention provides novel ActRIIB variants (in a homomultimeric or heteromultimeric form), as well as compositions and methods for using those variants to treat an indication associated with undesired activity of one or more TGFβ-superfamily ligands. The present invention also provides methods of screening compounds that modulate activity of an ActRIIB protein and/or an ActRIIB ligand. The compositions and methods provided herein are useful in treating diseases associated with abnormal activity of an ActRIIB protein and/or an ActRIIB ligand.

### CROSS-REFERENCE TO RELATED APPLICATIONS

[0001] This application claims the benefit of and priority to U.S. Provisional Application No. 62/969,635, filed Feb. 3, 2020 and U.S. Provisional Application No. 63/074,742, filed Sep. 4, 2020. The foregoing applications are incorporated herein by reference in their entirety.

### BACKGROUND OF THE INVENTION

[0002] The transforming growth factor-beta (TGF-beta) superfamily contains a variety of growth factors that share common sequence elements and structural motifs. These proteins are known to exert biological effects on a large variety of cell types in both vertebrates and invertebrates. Members of the superfamily perform important functions during embryonic development in pattern formation and tissue specification and can influence a variety of differentiation processes, including adipogenesis, myogenesis, chondrogenesis, cardiogenesis, hematopoiesis, neurogenesis, and epithelial cell differentiation. The family is divided into two general branches: the BMP/GDF and the TGF-beta/Activin/BMP10 branches, whose members have diverse, often complementary effects. By manipulating the activity of a member of the TGF-beta family, it is often possible to cause significant physiological changes in an organism. For example, the Piedmontese and Belgian Blue cattle breeds carry a loss-of-function mutation in the GDF8 (also called myostatin) gene that causes a marked increase in muscle mass. Grobet et al., Nat Genet. 1997, 17(1):71-4. Furthermore, in humans, inactive alleles of GDF8 are associated with increased muscle mass and, reportedly, exceptional strength. Schuelke et al., N Engl J Med 2004, 350:2682-8.

[0003] Changes in red blood cell levels, renal, pulmonary, cardiac, bone, cartilage and other tissues may be achieved by agonizing or antagonizing signaling that is mediated by an appropriate TGF-beta family member. Thus, there is a need for agents that function as potent regulators of TGF-beta signaling.

### SUMMARY OF THE INVENTION

[0004] In certain aspects, the present disclosure provides polypeptide, particularly variant ActRIIB polypeptides, variant ActRIIB homomultimer proteins, and variant ActRIIB heteromultimer proteins. In particular, the disclosure provides variant ActRIIB polypeptides with reduced binding affinity to BMP9 while retaining binding affinity to one or more of activin B, activin A, GDF11, GDF8, and BMP10. Accordingly, these variant ActRIIB polypeptides may be more useful than an unmodified ActRIIB polypeptide in certain applications where such selective antagonism is advantageous. Examples include therapeutic applications where it is desirable to retain antagonisms of one or more of activin A, activin B, GDF8, GDF11, and BMP10, while reducing antagonism of BMP9.

[0005] In part, the disclosure provides polypeptides, particularly variant ActRIIB polypeptides, variant ActRIIB homomultimer proteins, and variant ActRIIB heteromultimer proteins, that can be used to treat renal diseases or conditions (e.g., Alport syndrome, focal segmental glomerulosclerosis (FSGS), polycystic kidney disease, chronic kidney disease). Positive effects were observed for a variant ActRIIB polypeptide comprising a K mutation at position F82 in the UUO and Col4a3 (-/-) Alport syndrome models. The disclosure establishes that antagonists of the ActRII (e.g., ActRIIA and ActRIIB) signaling pathways may be used to reduce the severity of a renal disease or condition (e.g., Alport syndrome, focal segmental glomerulosclerosis (FSGS), polycystic kidney disease, chronic kidney disease), and that desirable therapeutic agents may be selected on the basis of ActRII signaling antagonist activity. Therefore, in some embodiments, the disclosure provides methods for using polypeptides, particularly variant ActRIIB polypeptides, variant ActRIIB homomultimer proteins, and variant ActRIIB heteromultimer proteins, for treating renal diseases or conditions including but not limited to Alport syndrome, focal segmental glomerulosclerosis (FSGS), polycystic kidney disease, and chronic kidney disease, including, for example, a variant ActRIIB polypeptide (e.g., a variant ActRIIB homomultimer protein or a variant ActRIIB heteromultimer protein) that inhibits one or more ActRIIA or ActRIIB ligands [e.g., activin A, activin B, GDF11, GDF8, GDF3, BMP6, BMP5, and BMP10].

[0006] In certain aspects, the present disclosure relates to a polypeptide comprising an amino acid sequence that is at least 75%, 80%, 85%, 90%, 91%, 92%, 93%, 94%, 95%, 96%, 97%, 98%, 99%, or 100% identical to an amino acid sequence that begins at any one of amino acids 20 -29 (e.g., amino acid residues 20, 21, 22, 23, 24, 25, 26, 27, 28, or 29) of SEQ ID NO: 2 and ends at any one of amino acids 109 -134 (e.g., amino acid residues 109, 110, 111, 112, 113, 114, 115, 116, 117, 118, 119, 120, 121, 122, 123, 124, 125, 126, 127, 128, 129, 130, 131, 132, 133, or 134) of SEQ ID NO: 2, and wherein the polypeptide comprises one or more amino acid substitutions at a position of SEQ ID NO: 2 selected from the group consisting of: N35, E50, E52, K55, L57, Y60, G68, K74, W78, L79, F82, N83, and E94. In some embodiments, the polypeptide comprises an amino acid sequence that is at least 75%, 80%, 85%, 90%, 91%, 92%, 93%, 94%, 95%, 96%, 97%, 98%, 99%, or 100% identical to amino acids 29-109 of SEQ ID NO: 2. In some embodiments, the polypeptide comprises an amino acid sequence that is at least 75%, 80%, 85%, 90%, 91%, 92%, 93%, 94%, 95%, 96%, 97%, 98%, 99%, or 100% identical to amino acids 25-131 of SEQ ID NO: 2. In some embodiments, the polypeptide comprises an amino acid sequence that is at least 75%, 80%, 85%, 90%, 91%, 92%, 93%, 94%, 95%, 96%, 97%, 98%, 99%, or 100% identical to amino acids 20-134 of SEQ ID NO: 2. In some embodiments, the polypeptide comprises an amino acid sequence that is at least 75%, 80%, 85%, 90%, 91%, 92%, 93%, 94%, 95%, 96%, 97%, 98%, 99%, or 100% identical to the amino acid sequence of SEQ ID NO: 53. In some embodiments, the polypeptide is a fusion protein further comprising a first polypeptide domain and one or more heterologous polypeptide domains. In some embodiments, the polypeptide is an ActRIIB-Fc fusion protein. In some embodiments, the fusion protein further comprises a linker domain positioned between the first polypeptide domain and the one or more heterologous domains or Fc domain. In some embodiments, the linker domain is selected from: TGGG, TGGGG, SGGGG, GGGGS, GGG, GGGG, SGGG, and GGGGS. In some embodiments, the polypeptide comprises an amino acid sequence that is at least 75%, 80%, 85%, 90%, 91%, 92%, 93%, 94%, 95%, 96%, 97%, 98%, 99%, or 100% identical to the amino acid sequence of SEQ ID NO: 5. In some embodiments, the polypeptide comprises an amino acid sequence that is at least 75%, 80%, 85%, 90%, 91%, 92%, 93%, 94%, 95%, 96%, 97%, 98%, 99%, or 100% identical to the amino acid sequence of SEQ ID NO: 12. In some embodiments, the polypeptide comprises an amino acid sequence that is at least 75%, 80%, 85%, 90%, 91%, 92%, 93%, 94%, 95%, 96%, 97%, 98%, 99%, or 100% identical to the amino acid sequence of SEQ ID NO: 519. In some embodiments, the polypeptide comprises one or more amino acid substitution with respect to the amino acid sequence of SEQ ID NO: 2 selected from the group consisting of: L38N, E50L, E52N, L57E, L57I, L57R, L57T, L57V, Y60D, G68R, K74E, W78Y, L79F, L79S, L79T, L79W, F82D, F82E, F82L, F82S, F82T, F82Y, N83R, E94K, and V99G. In some embodiments, the polypeptide comprises one or more amino acid substitution with respect to the amino acid sequence of SEQ ID NO: 2 selected from the group consisting of: L38N, E50L, E52D, E52N, E52Y, K55A, K55E, L57E, L57I, L57R, L57T, L57V, Y60D, G68R, K74E, W78Y, L79E, L79F, L79H, L79R, L79S, L79T, L79W, F82D, F82E, F82I, F82K, F82L, F82S, F82T, F82Y, N83R, E94K, and V99G. In some embodiments, the polypeptide comprises one or more amino acid substitution with respect to the amino acid sequence of SEQ ID NO: 2 selected from the group consisting of: A24, S26, N35, E37, L38, R40, S44, L46, E50, E52, Q53, D54, K55, R56, L57, Y60, R64, N65, S67, G68, K74, W78, L79, D80, F82, N83, T93, E94, Q98, V99, E105, E106, F108, E111, R112, A119, G120, E123, P129, P130, and A132. In some embodiments, the polypeptide comprises an L substitution at the position corresponding to E50 of SEQ ID NO: 2. In some embodiments, the polypeptide comprises an N substitution at the position corresponding to L38 of SEQ ID NO: 2. In some embodiments, the polypeptide comprises a G substitution at the position corresponding to V99 of SEQ ID NO: 2. In some embodiments, the polypeptide comprises an R substitution at the position corresponding to N83 of SEQ ID NO: 2. In some embodiments, the polypeptide comprises an T substitution at the position corresponding to F82 of SEQ ID NO: 2. In some embodiments, the polypeptide comprises an H substitution at the position corresponding to L79 of SEQ ID NO: 2. In some embodiments, the polypeptide comprises an amino acid sequence that is at least 75%, 80%, 85%, 90%, 91%, 92%, 93%, 94%, 95%, 96%, 97%, 98%, 99%, or 100% identical to the amino acid sequence of SEQ ID NO: 522. In some embodiments, the polypeptide comprises an amino acid sequence that is at least 75%, 80%, 85%, 90%, 91%, 92%, 93%, 94%, 95%, 96%, 97%, 98%, 99%, or 100% identical to the amino acid sequence of SEQ ID NO: 524. In some embodiments, the polypeptide comprises a K substitution at the position corresponding to F82 of SEQ ID NO: 2. In some embodiments, the polypeptide comprises an amino acid sequence that is at least 75%, 80%, 85%, 90%, 91%, 92%, 93%, 94%, 95%, 96%, 97%, 98%, 99%, or 100% identical to the amino acid sequence of SEQ ID NO: 276. In some embodiments, the polypeptide comprises an amino acid sequence that is at least 75%, 80%, 85%, 90%, 91%, 92%, 93%, 94%, 95%, 96%, 97%, 98%, 99%, or 100% identical to the amino acid sequence of SEQ ID NO: 278. In some embodiments, the polypeptide comprises an I substitution at the position corresponding to F82 of SEQ ID NO: 2 and an R substitution at the position corresponding to N83. In some embodiments, the polypeptide comprises an amino acid sequence that is at least 75%, 80%, 85%, 90%, 91%, 92%, 93%, 94%, 95%, 96%, 97%, 98%, 99%, or 100% identical to the amino acid sequence of SEQ ID NO: 279. In some embodiments, the polypeptide comprises an amino acid sequence that is at least 75%, 80%, 85%, 90%, 91%, 92%, 93%, 94%, 95%, 96%, 97%, 98%, 99%, or 100% identical to the amino acid sequence of SEQ ID NO: 332. In some embodiments, the polypeptide comprises a K substitution at the position corresponding to F82 of SEQ ID NO: 2 and an R substitution at the position corresponding to N83. In some embodiments, the polypeptide comprises an amino acid sequence that is at least 75%, 80%, 85%, 90%, 91%, 92%, 93%, 94%, 95%, 96%, 97%, 98%, 99%, or 100% identical to the amino acid sequence of SEQ ID NO: 333. In some embodiments, the polypeptide comprises an amino acid sequence that is at least 75%, 80%, 85%, 90%, 91%, 92%, 93%, 94%, 95%, 96%, 97%, 98%, 99%, or 100% identical to the amino acid sequence of SEQ ID NO: 335. In some embodiments, the polypeptide comprises a T substitution at the position corresponding to F82 of SEQ ID NO: 2 and an R substitution at the position corresponding to N83. In some embodiments, the polypeptide comprises an amino acid sequence that is at least 75%, 80%, 85%, 90%, 91%, 92%, 93%, 94%, 95%, 96%, 97%, 98%, 99%, or 100% identical to the amino acid sequence of SEQ ID NO: 336. In some embodiments, the polypeptide comprises an amino acid sequence that is at least 75%, 80%, 85%, 90%, 91%, 92%, 93%, 94%, 95%, 96%, 97%, 98%, 99%, or 100% identical to the amino acid sequence of SEQ ID NO: 338. In some embodiments, the polypeptide comprises a T substitution at the position corresponding to F82 of SEQ ID NO: 2. In some embodiments, the polypeptide comprises an amino acid sequence that is at least 75%, 80%, 85%, 90%, 91%, 92%, 93%, 94%, 95%, 96%, 97%, 98%, 99%, or 100% identical to the amino acid sequence of SEQ ID NO: 339. In some embodiments, the polypeptide comprises an amino acid sequence that is at least 75%, 80%, 85%, 90%, 91%, 92%, 93%, 94%, 95%, 96%, 97%, 98%, 99%, or 100% identical to the amino acid sequence of SEQ ID NO: 341. In some embodiments, the polypeptide comprises an H substitution at the position corresponding to L79 of SEQ ID NO: 2 and an I substitution at the position corresponding to F82. In some embodiments, the polypeptide comprises an amino acid sequence that is at least 75%, 80%, 85%, 90%, 91%, 92%, 93%, 94%, 95%, 96%, 97%, 98%, 99%, or 100% identical to the amino acid sequence of SEQ ID NO: 342. In some embodiments, the polypeptide comprises an amino acid sequence that is at least 75%, 80%, 85%, 90%, 91%, 92%, 93%, 94%, 95%, 96%, 97%, 98%, 99%, or 100% identical to the amino acid sequence of SEQ ID NO: 344. In some embodiments, the polypeptide comprises an H substitution at the position corresponding to L79 of SEQ ID NO: 2. In some embodiments, the polypeptide comprises an amino acid sequence that is at least 75%, 80%, 85%, 90%, 91%, 92%, 93%, 94%, 95%, 96%, 97%, 98%, 99%, or 100% identical to the amino acid sequence of SEQ ID NO: 345. In some embodiments, the polypeptide comprises an amino acid sequence that is at least 75%, 80%, 85%, 90%, 91%, 92%, 93%, 94%, 95%, 96%, 97%, 98%, 99%, or 100% identical to the amino acid sequence of SEQ ID NO: 347. In some embodiments, the polypeptide comprises an H substitution at the position corresponding to L79 of SEQ ID NO: 2 and an K substitution at the position corresponding to F82. In some embodiments, the polypeptide comprises an amino acid sequence that is at least 75%, 80%, 85%, 90%, 91%, 92%, 93%, 94%, 95%, 96%, 97%, 98%, 99%, or 100% identical to the amino acid sequence of SEQ ID NO: 348. In some embodiments, the polypeptide comprises an amino acid sequence that is at least 75%, 80%, 85%, 90%, 91%, 92%, 93%, 94%, 95%, 96%, 97%, 98%, 99%, or 100% identical to the amino acid sequence of SEQ ID NO: 350. In some embodiments, the polypeptide comprises an L substitution at the position corresponding to E50 of SEQ ID NO: 2. In some embodiments, the polypeptide comprises an amino acid sequence that is at least 75%, 80%, 85%, 90%, 91%, 92%, 93%, 94%, 95%, 96%, 97%, 98%, 99%, or 100% identical to the amino acid sequence of SEQ ID NO: 351. In some embodiments, the polypeptide comprises an amino acid sequence that is at least 75%, 80%, 85%, 90%, 91%, 92%, 93%, 94%, 95%, 96%, 97%, 98%, 99%, or 100% identical to the amino acid sequence of SEQ ID NO: 353. In some embodiments, the polypeptide comprises an N substitution at the position corresponding to L38 of SEQ ID NO: 2 and an R substitution at the position corresponding to L79. In some embodiments, the polypeptide comprises an amino acid sequence that is at least 75%, 80%, 85%, 90%, 91%, 92%, 93%, 94%, 95%, 96%, 97%, 98%, 99%, or 100% identical to the amino acid sequence of SEQ ID NO: 354. In some embodiments, the polypeptide comprises an amino acid sequence that is at least 75%, 80%, 85%, 90%, 91%, 92%, 93%, 94%, 95%, 96%, 97%, 98%, 99%, or 100% identical to the amino acid sequence of SEQ ID NO: 356. In some embodiments, the polypeptide comprises an G substitution at the position corresponding to V99 of SEQ ID NO: 2. In some embodiments, the polypeptide comprises an amino acid sequence that is at least 75%, 80%, 85%, 90%, 91%, 92%, 93%, 94%, 95%, 96%, 97%, 98%, 99%, or 100% identical to the amino acid sequence of SEQ ID NO: 366. In some embodiments, the polypeptide comprises an amino acid sequence that is at least 75%, 80%, 85%, 90%, 91%, 92%, 93%, 94%, 95%, 96%, 97%, 98%, 99%, or 100% identical to the amino acid sequence of SEQ ID NO: 368. In some embodiments, the polypeptide comprises an E substitution at the position corresponding to N35 of SEQ ID NO: 2. In some embodiments, the polypeptide comprises an amino acid sequence that is at least 75%, 80%, 85%, 90%, 91%, 92%, 93%, 94%, 95%, 96%, 97%, 98%, 99%, or 100% identical to the amino acid sequence of SEQ ID NO: 369. In some embodiments, the polypeptide comprises an amino acid sequence that is at least 75%, 80%, 85%, 90%, 91%, 92%, 93%, 94%, 95%, 96%, 97%, 98%, 99%, or 100% identical to the amino acid sequence of SEQ ID NO: 371. In some embodiments, the polypeptide comprises an N substitution at the position corresponding to E52 of SEQ ID NO: 2. In some embodiments, the polypeptide comprises an amino acid sequence that is at least 75%, 80%, 85%, 90%, 91%, 92%, 93%, 94%, 95%, 96%, 97%, 98%, 99%, or 100% identical to the amino acid sequence of SEQ ID NO: 372. In some embodiments, the polypeptide comprises an amino acid sequence that is at least 75%, 80%, 85%, 90%, 91%, 92%, 93%, 94%, 95%, 96%, 97%, 98%, 99%, or 100% identical to the amino acid sequence of SEQ ID NO: 374. In some embodiments, the polypeptide comprises a D substitution at the position corresponding to Y60 of SEQ ID NO: 2. In some embodiments, the polypeptide comprises an amino acid sequence that is at least 75%, 80%, 85%, 90%, 91%, 92%, 93%, 94%, 95%, 96%, 97%, 98%, 99%, or 100% identical to the amino acid sequence of SEQ ID NO: 375. In some embodiments, the polypeptide comprises an amino acid sequence that is at least 75%, 80%, 85%, 90%, 91%, 92%, 93%, 94%, 95%, 96%, 97%, 98%, 99%, or 100% identical to the amino acid sequence of SEQ ID NO: 377. In some embodiments, the polypeptide comprises an R substitution at the position corresponding to G68 of SEQ ID NO: 2. In some embodiments, the polypeptide comprises an amino acid sequence that is at least 75%, 80%, 85%, 90%, 91%, 92%, 93%, 94%, 95%, 96%, 97%, 98%, 99%, or 100% identical to the amino acid sequence of SEQ ID NO: 378. In some embodiments, the polypeptide comprises an amino acid sequence that is at least 75%, 80%, 85%, 90%, 91%, 92%, 93%, 94%, 95%, 96%, 97%, 98%, 99%, or 100% identical to the amino acid sequence of SEQ ID NO: 380. In some embodiments, the polypeptide comprises an E substitution at the position corresponding to K74 of SEQ ID NO: 2. In some embodiments, the polypeptide comprises an amino acid sequence that is at least 75%, 80%, 85%, 90%, 91%, 92%, 93%, 94%, 95%, 96%, 97%, 98%, 99%, or 100% identical to the amino acid sequence of SEQ ID NO: 381. In some embodiments, the polypeptide comprises an amino acid sequence that is at least 75%, 80%, 85%, 90%, 91%, 92%, 93%, 94%, 95%, 96%, 97%, 98%, 99%, or 100% identical to the amino acid sequence of SEQ ID NO: 383. In some embodiments, the polypeptide comprises an Y substitution at the position corresponding to W78 of SEQ ID NO: 2. In some embodiments, the polypeptide comprises an amino acid sequence that is at least 75%, 80%, 85%, 90%, 91%, 92%, 93%, 94%, 95%, 96%, 97%, 98%, 99%, or 100% identical to the amino acid sequence of SEQ ID NO: 384. In some embodiments, the polypeptide comprises an amino acid sequence that is at least 75%, 80%, 85%, 90%, 91%, 92%, 93%, 94%, 95%, 96%, 97%, 98%, 99%, or 100% identical to the amino acid sequence of SEQ ID NO: 386. In some embodiments, the polypeptide comprises an A substitution at the position corresponding to L79 of SEQ ID NO: 2. In some embodiments, the polypeptide comprises an amino acid sequence that is at least 75%, 80%, 85%, 90%, 91%, 92%, 93%, 94%, 95%, 96%, 97%, 98%, 99%, or 100% identical to the amino acid sequence of SEQ ID NO: 387. In some embodiments, the polypeptide comprises an amino acid sequence that is at least 75%, 80%, 85%, 90%, 91%, 92%, 93%, 94%, 95%, 96%, 97%, 98%, 99%, or 100% identical to the amino acid sequence of SEQ ID NO: 389. In some embodiments, the polypeptide comprises a K substitution at the position corresponding to L79 of SEQ ID NO: 2. In some embodiments, the polypeptide comprises an amino acid sequence that is at least 75%, 80%, 85%, 90%, 91%, 92%, 93%, 94%, 95%, 96%, 97%, 98%, 99%, or 100% identical to the amino acid sequence of SEQ ID NO: 390. In some embodiments, the polypeptide comprises an amino acid sequence that is at least 75%, 80%, 85%, 90%, 91%, 92%, 93%, 94%, 95%, 96%, 97%, 98%, 99%, or 100% identical to the amino acid sequence of SEQ ID NO: 392. In some embodiments, the polypeptide comprises an S substitution at the position corresponding to L79 of SEQ ID NO: 2. In some embodiments, the polypeptide comprises an amino acid sequence that is at least 75%, 80%, 85%, 90%, 91%, 92%, 93%, 94%, 95%, 96%, 97%, 98%, 99%, or 100% identical to the amino acid sequence of SEQ ID NO: 393. In some embodiments, the polypeptide comprises an amino acid sequence that is at least 75%, 80%, 85%, 90%, 91%, 92%, 93%, 94%, 95%, 96%, 97%, 98%, 99%, or 100% identical to the amino acid sequence of SEQ ID NO: 395. In some embodiments, the polypeptide comprises an W substitution at the position corresponding to L79 of SEQ ID NO: 2. In some embodiments, the polypeptide comprises an amino acid sequence that is at least 75%, 80%, 85%, 90%, 91%, 92%, 93%, 94%, 95%, 96%, 97%, 98%, 99%, or 100% identical to the amino acid sequence of SEQ ID NO: 396. In some embodiments, the polypeptide comprises an amino acid sequence that is at least 75%, 80%, 85%, 90%, 91%, 92%, 93%, 94%, 95%, 96%, 97%, 98%, 99%, or 100% identical to the amino acid sequence of SEQ ID NO: 398. In some embodiments, the polypeptide comprises a D substitution at the position corresponding to F82 of SEQ ID NO: 2. In some embodiments, the polypeptide comprises an amino acid sequence that is at least 75%, 80%, 85%, 90%, 91%, 92%, 93%, 94%, 95%, 96%, 97%, 98%, 99%, or 100% identical to the amino acid sequence of SEQ ID NO: 399. In some embodiments, the polypeptide comprises an amino acid sequence that is at least 75%, 80%, 85%, 90%, 91%, 92%, 93%, 94%, 95%, 96%, 97%, 98%, 99%, or 100% identical to the amino acid sequence of SEQ ID NO: 401. In some embodiments, the polypeptide comprises an E substitution at the position corresponding to F82 of SEQ ID NO: 2. In some embodiments, the polypeptide comprises an amino acid sequence that is at least 75%, 80%, 85%, 90%, 91%, 92%, 93%, 94%, 95%, 96%, 97%, 98%, 99%, or 100% identical to the amino acid sequence of SEQ ID NO: 402. In some embodiments, the polypeptide comprises an amino acid sequence that is at least 75%, 80%, 85%, 90%, 91%, 92%, 93%, 94%, 95%, 96%, 97%, 98%, 99%, or 100% identical to the amino acid sequence of SEQ ID NO: 404. In some embodiments, the polypeptide comprises a L substitution at the position corresponding to F82 of SEQ ID NO: 2. In some embodiments, the polypeptide comprises an amino acid sequence that is at least 75%, 80%, 85%, 90%, 91%, 92%, 93%, 94%, 95%, 96%, 97%, 98%, 99%, or 100% identical to the amino acid sequence of SEQ ID NO: 405. In some embodiments, the polypeptide comprises an amino acid sequence that is at least 75%, 80%, 85%, 90%, 91%, 92%, 93%, 94%, 95%, 96%, 97%, 98%, 99%, or 100% identical to the amino acid sequence of SEQ ID NO: 407. In some embodiments, the polypeptide comprises a S substitution at the position corresponding to F82 of SEQ ID NO: 2. In some embodiments, the polypeptide comprises an amino acid sequence that is at least 75%, 80%, 85%, 90%, 91%, 92%, 93%, 94%, 95%, 96%, 97%, 98%, 99%, or 100% identical to the amino acid sequence of SEQ ID NO: 408. In some embodiments, the polypeptide comprises an amino acid sequence that is at least 75%, 80%, 85%, 90%, 91%, 92%, 93%, 94%, 95%, 96%, 97%, 98%, 99%, or 100% identical to the amino acid sequence of SEQ ID NO: 410. In some embodiments, the polypeptide comprises a Y substitution at the position corresponding to F82 of SEQ ID NO: 2. In some embodiments, the polypeptide comprises an amino acid sequence that is at least 75%, 80%, 85%, 90%, 91%, 92%, 93%, 94%, 95%, 96%, 97%, 98%, 99%, or 100% identical to the amino acid sequence of SEQ ID NO: 411. In some embodiments, the polypeptide comprises an amino acid sequence that is at least 75%, 80%, 85%, 90%, 91%, 92%, 93%, 94%, 95%, 96%, 97%, 98%, 99%, or 100% identical to the amino acid sequence of SEQ ID NO: 413. In some embodiments, the polypeptide comprises a K substitution at the position corresponding to E94 of SEQ ID NO: 2. In some embodiments, the polypeptide comprises an amino acid sequence that is at least 75%, 80%, 85%, 90%, 91%, 92%, 93%, 94%, 95%, 96%, 97%, 98%, 99%, or 100% identical to the amino acid sequence of SEQ ID NO: 414. In some embodiments, the polypeptide comprises an amino acid sequence that is at least 75%, 80%, 85%, 90%, 91%, 92%, 93%, 94%, 95%, 96%, 97%, 98%, 99%, or 100% identical to the amino acid sequence of SEQ ID NO: 416. In some embodiments, the polypeptide comprises a D substitution at the position corresponding to E52 of SEQ ID NO: 2 and a D substitution at the position corresponding to F82 of SEQ ID NO: 2. In some embodiments, the polypeptide comprises an amino acid sequence that is at least 75%, 80%, 85%, 90%, 91%, 92%, 93%, 94%, 95%, 96%, 97%, 98%, 99%, or 100% identical to the amino acid sequence of SEQ ID NO: 417. In some embodiments, the polypeptide comprises an amino acid sequence that is at least 75%, 80%, 85%, 90%, 91%, 92%, 93%, 94%, 95%, 96%, 97%, 98%, 99%, or 100% identical to the amino acid sequence of SEQ ID NO: 419. In some embodiments, the polypeptide comprises a D substitution at the position corresponding to E52 of SEQ ID NO: 2 and a T substitution at the position corresponding to F82 of SEQ ID NO: 2. In some embodiments, the polypeptide comprises an amino acid sequence that is at least 75%, 80%, 85%, 90%, 91%, 92%, 93%, 94%, 95%, 96%, 97%, 98%, 99%, or 100% identical to the amino acid sequence of SEQ ID NO: 420. In some embodiments, the polypeptide comprises an amino acid sequence that is at least 75%, 80%, 85%, 90%, 91%, 92%, 93%, 94%, 95%, 96%, 97%, 98%, 99%, or 100% identical to the amino acid sequence of SEQ ID NO: 422. In some embodiments, the polypeptide comprises an R substitution at the position corresponding to L57 of SEQ ID NO: 2 and a D substitution at the position corresponding to F82 of SEQ ID NO: 2. In some embodiments, the polypeptide comprises an amino acid sequence that is at least 75%, 80%, 85%, 90%, 91%, 92%, 93%, 94%, 95%, 96%, 97%, 98%, 99%, or 100% identical to the amino acid sequence of SEQ ID NO: 423. In some embodiments, the polypeptide comprises an amino acid sequence that is at least 75%, 80%, 85%, 90%, 91%, 92%, 93%, 94%, 95%, 96%, 97%, 98%, 99%, or 100% identical to the amino acid sequence of SEQ ID NO: 425. In some embodiments, the polypeptide comprises an R substitution at the position corresponding to L57 of SEQ ID NO: 2 and an S substitution at the position corresponding to F82 of SEQ ID NO: 2. In some embodiments, the polypeptide comprises an amino acid sequence that is at least 75%, 80%, 85%, 90%, 91%, 92%, 93%, 94%, 95%, 96%, 97%, 98%, 99%, or 100% identical to the amino acid sequence of SEQ ID NO: 426. In some embodiments, the polypeptide comprises an amino acid sequence that is at least 75%, 80%, 85%, 90%, 91%, 92%, 93%, 94%, 95%, 96%, 97%, 98%, 99%, or 100% identical to the amino acid sequence of SEQ ID NO: 428. In some embodiments, the polypeptide comprises an R substitution at the position corresponding to L57 of SEQ ID NO: 2 and a T substitution at the position corresponding to F82 of SEQ ID NO: 2. In some embodiments, the polypeptide comprises an amino acid sequence that is at least 75%, 80%, 85%, 90%, 91%, 92%, 93%, 94%, 95%, 96%, 97%, 98%, 99%, or 100% identical to the amino acid sequence of SEQ ID NO: 429. In some embodiments, the polypeptide comprises an amino acid sequence that is at least 75%, 80%, 85%, 90%, 91%, 92%, 93%, 94%, 95%, 96%, 97%, 98%, 99%, or 100% identical to the amino acid sequence of SEQ ID NO: 431. In some embodiments, the polypeptide comprises an F substitution at the position corresponding to L79 of SEQ ID NO: 2 and a D substitution at the position corresponding to F82 of SEQ ID NO: 2. In some embodiments, the polypeptide comprises an amino acid sequence that is at least 75%, 80%, 85%, 90%, 91%, 92%, 93%, 94%, 95%, 96%, 97%, 98%, 99%, or 100% identical to the amino acid sequence of SEQ ID NO: 432. In some embodiments, the polypeptide comprises an amino acid sequence that is at least 75%, 80%, 85%, 90%, 91%, 92%, 93%, 94%, 95%, 96%, 97%, 98%, 99%, or 100% identical to the amino acid sequence of SEQ ID NO: 434. In some embodiments, the polypeptide comprises an F substitution at the position corresponding to L79 of SEQ ID NO: 2 and a T substitution at the position corresponding to F82 of SEQ ID NO: 2. In some embodiments, the polypeptide comprises an amino acid sequence that is at least 75%, 80%, 85%, 90%, 91%, 92%, 93%, 94%, 95%, 96%, 97%, 98%, 99%, or 100% identical to the amino acid sequence of SEQ ID NO: 435. In some embodiments, the polypeptide comprises an amino acid sequence that is at least 75%, 80%, 85%, 90%, 91%, 92%, 93%, 94%, 95%, 96%, 97%, 98%, 99%, or 100% identical to the amino acid sequence of SEQ ID NO: 437. In some embodiments, the polypeptide comprises a D substitution at the position corresponding to F82 of SEQ ID NO: 2 and an R substitution at the position corresponding to N83 of SEQ ID NO: 2. In some embodiments, the polypeptide comprises an amino acid sequence that is at least 75%, 80%, 85%, 90%, 91%, 92%, 93%, 94%, 95%, 96%, 97%, 98%, 99%, or 100% identical to the amino acid sequence of SEQ ID NO: 438. In some embodiments, the polypeptide comprises an amino acid sequence that is at least 75%, 80%, 85%, 90%, 91%, 92%, 93%, 94%, 95%, 96%, 97%, 98%, 99%, or 100% identical to the amino acid sequence of SEQ ID NO: 440. In some embodiments, the polypeptide comprises an E substitution at the position corresponding to F82 of SEQ ID NO: 2 and an R substitution at the position corresponding to N83 of SEQ ID NO: 2. In some embodiments, the polypeptide comprises an amino acid sequence that is at least 75%, 80%, 85%, 90%, 91%, 92%, 93%, 94%, 95%, 96%, 97%, 98%, 99%, or 100% identical to the amino acid sequence of SEQ ID NO: 441. In some embodiments, the polypeptide comprises an amino acid sequence that is at least 75%, 80%, 85%, 90%, 91%, 92%, 93%, 94%, 95%, 96%, 97%, 98%, 99%, or 100% identical to the amino acid sequence of SEQ ID NO: 443. In some embodiments, the polypeptide comprises an S substitution at the position corresponding to F82 of SEQ ID NO: 2 and an R substitution at the position corresponding to N83 of SEQ ID NO: 2. In some embodiments, the polypeptide comprises an amino acid sequence that is at least 75%, 80%, 85%, 90%, 91%, 92%, 93%, 94%, 95%, 96%, 97%, 98%, 99%, or 100% identical to the amino acid sequence of SEQ ID NO: 444. In some embodiments, the polypeptide comprises an amino acid sequence that is at least 75%, 80%, 85%, 90%, 91%, 92%, 93%, 94%, 95%, 96%, 97%, 98%, 99%, or 100% identical to the amino acid sequence of SEQ ID NO: 446. In some embodiments, the polypeptide comprises an W substitution at the position corresponding to F82 of SEQ ID NO: 2 and an A substitution at the position corresponding to N83 of SEQ ID NO: 2. In some embodiments, the polypeptide comprises an amino acid sequence that is at least 75%, 80%, 85%, 90%, 91%, 92%, 93%, 94%, 95%, 96%, 97%, 98%, 99%, or 100% identical to the amino acid sequence of SEQ ID NO: 447. In some embodiments, the polypeptide comprises an amino acid sequence that is at least 75%, 80%, 85%, 90%, 91%, 92%, 93%, 94%, 95%, 96%, 97%, 98%, 99%, or 100% identical to the amino acid sequence of SEQ ID NO: 449. In some embodiments, the polypeptide comprises an I substitution at the position corresponding to F82 of SEQ ID NO: 2 and a K substitution at the position corresponding to E94 of SEQ ID NO: 2. In some embodiments, the polypeptide comprises an amino acid sequence that is at least 75%, 80%, 85%, 90%, 91%, 92%, 93%, 94%, 95%, 96%, 97%, 98%, 99%, or 100% identical to the amino acid sequence of SEQ ID NO: 450. In some embodiments, the polypeptide comprises an amino acid sequence that is at least 75%, 80%, 85%, 90%, 91%, 92%, 93%, 94%, 95%, 96%, 97%, 98%, 99%, or 100% identical to the amino acid sequence of SEQ ID NO: 452. In some embodiments, the polypeptide comprises an L substitution at the position corresponding to E50 of SEQ ID NO: 2, a D substitution at the position corresponding to F82 of SEQ ID NO: 2, and an R substitution at the position corresponding to N83 of SEQ ID NO: 2. In some embodiments, the polypeptide comprises an amino acid sequence that is at least 75%, 80%, 85%, 90%, 91%, 92%, 93%, 94%, 95%, 96%, 97%, 98%, 99%, or 100% identical to the amino acid sequence of SEQ ID NO: 453. In some embodiments, the polypeptide comprises an amino acid sequence that is at least 75%, 80%, 85%, 90%, 91%, 92%, 93%, 94%, 95%, 96%, 97%, 98%, 99%, or 100% identical to the amino acid sequence of SEQ ID NO: 455. In some embodiments, the polypeptide comprises a D substitution at the position corresponding to E52 of SEQ ID NO: 2, a D substitution at the position corresponding to F82 of SEQ ID NO: 2, and an R substitution at the position corresponding to N83 of SEQ ID NO: 2. In some embodiments, the polypeptide comprises an amino acid sequence that is at least 75%, 80%, 85%, 90%, 91%, 92%, 93%, 94%, 95%, 96%, 97%, 98%, 99%, or 100% identical to the amino acid sequence of SEQ ID NO: 456. In some embodiments, the polypeptide comprises an amino acid sequence that is at least 75%, 80%, 85%, 90%, 91%, 92%, 93%, 94%, 95%, 96%, 97%, 98%, 99%, or 100% identical to the amino acid sequence of SEQ ID NO: 458. In some embodiments, the polypeptide comprises a D substitution at the position corresponding to E52 of SEQ ID NO: 2, an E substitution at the position corresponding to F82 of SEQ ID NO: 2, and an R substitution at the position corresponding to N83 of SEQ ID NO: 2. In some embodiments, the polypeptide comprises an amino acid sequence that is at least 75%, 80%, 85%, 90%, 91%, 92%, 93%, 94%, 95%, 96%, 97%, 98%, 99%, or 100% identical to the amino acid sequence of SEQ ID NO: 459. In some embodiments, the polypeptide comprises an amino acid sequence that is at least 75%, 80%, 85%, 90%, 91%, 92%, 93%, 94%, 95%, 96%, 97%, 98%, 99%, or 100% identical to the amino acid sequence of SEQ ID NO: 461. In some embodiments, the polypeptide comprises a D substitution at the position corresponding to E52 of SEQ ID NO: 2, a T substitution at the position corresponding to F82 of SEQ ID NO: 2, and an R substitution at the position corresponding to N83 of SEQ ID NO: 2. In some embodiments, the polypeptide comprises an amino acid sequence that is at least 75%, 80%, 85%, 90%, 91%, 92%, 93%, 94%, 95%, 96%, 97%, 98%, 99%, or 100% identical to the amino acid sequence of SEQ ID NO: 462. In some embodiments, the polypeptide comprises an amino acid sequence that is at least 75%, 80%, 85%, 90%, 91%, 92%, 93%, 94%, 95%, 96%, 97%, 98%, 99%, or 100% identical to the amino acid sequence of SEQ ID NO: 464. In some embodiments, the polypeptide comprises an N substitution at the position corresponding to E52 of SEQ ID NO: 2, an I substitution at the position corresponding to F82 of SEQ ID NO: 2, and an R substitution at the position corresponding to N83 of SEQ ID NO: 2. In some embodiments, the polypeptide comprises an amino acid sequence that is at least 75%, 80%, 85%, 90%, 91%, 92%, 93%, 94%, 95%, 96%, 97%, 98%, 99%, or 100% identical to the amino acid sequence of SEQ ID NO: 465. In some embodiments, the polypeptide comprises an amino acid sequence that is at least 75%, 80%, 85%, 90%, 91%, 92%, 93%, 94%, 95%, 96%, 97%, 98%, 99%, or 100% identical to the amino acid sequence of SEQ ID NO: 467. In some embodiments, the polypeptide comprises an N substitution at the position corresponding to E52 of SEQ ID NO: 2, a Y substitution at the position corresponding to F82 of SEQ ID NO: 2, and an R substitution at the position corresponding to N83 of SEQ ID NO: 2. In some embodiments, the polypeptide comprises an amino acid sequence that is at least 75%, 80%, 85%, 90%, 91%, 92%, 93%, 94%, 95%, 96%, 97%, 98%, 99%, or 100% identical to the amino acid sequence of SEQ ID NO: 468. In some embodiments, the polypeptide comprises an amino acid sequence that is at least 75%, 80%, 85%, 90%, 91%, 92%, 93%, 94%, 95%, 96%, 97%, 98%, 99%, or 100% identical to the amino acid sequence of SEQ ID NO: 470. In some embodiments, the polypeptide comprises a Y substitution at the position corresponding to E52 of SEQ ID NO: 2, a D substitution at the position corresponding to F82 of SEQ ID NO: 2, and an R substitution at the position corresponding to N83 of SEQ ID NO: 2. In some embodiments, the polypeptide comprises an amino acid sequence that is at least 75%, 80%, 85%, 90%, 91%, 92%, 93%, 94%, 95%, 96%, 97%, 98%, 99%, or 100% identical to the amino acid sequence of SEQ ID NO: 471. In some embodiments, the polypeptide comprises an amino acid sequence that is at least 75%, 80%, 85%, 90%, 91%, 92%, 93%, 94%, 95%, 96%, 97%, 98%, 99%, or 100% identical to the amino acid sequence of SEQ ID NO: 473. In some embodiments, the polypeptide comprises an E substitution at the position corresponding to L57 of SEQ ID NO: 2, an E substitution at the position corresponding to F82 of SEQ ID NO: 2, and an R substitution at the position corresponding to N83 of SEQ ID NO: 2. In some embodiments, the polypeptide comprises an amino acid sequence that is at least 75%, 80%, 85%, 90%, 91%, 92%, 93%, 94%, 95%, 96%, 97%, 98%, 99%, or 100% identical to the amino acid sequence of SEQ ID NO: 474. In some embodiments, the polypeptide comprises an amino acid sequence that is at least 75%, 80%, 85%, 90%, 91%, 92%, 93%, 94%, 95%, 96%, 97%, 98%, 99%, or 100% identical to the amino acid sequence of SEQ ID NO: 476. In some embodiments, the polypeptide comprises an I substitution at the position corresponding to L57 of SEQ ID NO: 2, a D substitution at the position corresponding to F82 of SEQ ID NO: 2, and an R substitution at the position corresponding to N83 of SEQ ID NO: 2. In some embodiments, the polypeptide comprises an amino acid sequence that is at least 75%, 80%, 85%, 90%, 91%, 92%, 93%, 94%, 95%, 96%, 97%, 98%, 99%, or 100% identical to the amino acid sequence of SEQ ID NO: 477. In some embodiments, the polypeptide comprises an amino acid sequence that is at least 75%, 80%, 85%, 90%, 91%, 92%, 93%, 94%, 95%, 96%, 97%, 98%, 99%, or 100% identical to the amino acid sequence of SEQ ID NO: 479. In some embodiments, the polypeptide comprises an I substitution at the position corresponding to L57 of SEQ ID NO: 2, an E substitution at the position corresponding to F82 of SEQ ID NO: 2, and an R substitution at the position corresponding to N83 of SEQ ID NO: 2. In some embodiments, the polypeptide comprises an amino acid sequence that is at least 75%, 80%, 85%, 90%, 91%, 92%, 93%, 94%, 95%, 96%, 97%, 98%, 99%, or 100% identical to the amino acid sequence of SEQ ID NO: 480. In some embodiments, the polypeptide comprises an amino acid sequence that is at least 75%, 80%, 85%, 90%, 91%, 92%, 93%, 94%, 95%, 96%, 97%, 98%, 99%, or 100% identical to the amino acid sequence of SEQ ID NO: 482. In some embodiments, the polypeptide comprises an R substitution at the position corresponding to L57 of SEQ ID NO: 2, an D substitution at the position corresponding to F82 of SEQ ID NO: 2, and an R substitution at the position corresponding to N83 of SEQ ID NO: 2. In some embodiments, the polypeptide comprises an amino acid sequence that is at least 75%, 80%, 85%, 90%, 91%, 92%, 93%, 94%, 95%, 96%, 97%, 98%, 99%, or 100% identical to the amino acid sequence of SEQ ID NO: 483. In some embodiments, the polypeptide comprises an amino acid sequence that is at least 75%, 80%, 85%, 90%, 91%, 92%, 93%, 94%, 95%, 96%, 97%, 98%, 99%, or 100% identical to the amino acid sequence of SEQ ID NO: 485. In some embodiments, the polypeptide comprises an R substitution at the position corresponding to L57 of SEQ ID NO: 2, an E substitution at the position corresponding to F82 of SEQ ID NO: 2, and an R substitution at the position corresponding to N83 of SEQ ID NO: 2. In some embodiments, the polypeptide comprises an amino acid sequence that is at least 75%, 80%, 85%, 90%, 91%, 92%, 93%, 94%, 95%, 96%, 97%, 98%, 99%, or 100% identical to the amino acid sequence of SEQ ID NO: 486. In some embodiments, the polypeptide comprises an amino acid sequence that is at least 75%, 80%, 85%, 90%, 91%, 92%, 93%, 94%, 95%, 96%, 97%, 98%, 99%, or 100% identical to the amino acid sequence of SEQ ID NO: 488. In some embodiments, the polypeptide comprises an R substitution at the position corresponding to L57 of SEQ ID NO: 2, an L substitution at the position corresponding to F82 of SEQ ID NO: 2, and an R substitution at the position corresponding to N83 of SEQ ID NO: 2. In some embodiments, the polypeptide comprises an amino acid sequence that is at least 75%, 80%, 85%, 90%, 91%, 92%, 93%, 94%, 95%, 96%, 97%, 98%, 99%, or 100% identical to the amino acid sequence of SEQ ID NO: 489. In some embodiments, the polypeptide comprises an amino acid sequence that is at least 75%, 80%, 85%, 90%, 91%, 92%, 93%, 94%, 95%, 96%, 97%, 98%, 99%, or 100% identical to the amino acid sequence of SEQ ID NO: 491. In some embodiments, the polypeptide comprises a T substitution at the position corresponding to L57 of SEQ ID NO: 2, a Y substitution at the position corresponding to F82 of SEQ ID NO: 2, and an R substitution at the position corresponding to N83 of SEQ ID NO: 2. In some embodiments, the polypeptide comprises an amino acid sequence that is at least 75%, 80%, 85%, 90%, 91%, 92%, 93%, 94%, 95%, 96%, 97%, 98%, 99%, or 100% identical to the amino acid sequence of SEQ ID NO: 492. In some embodiments, the polypeptide comprises an amino acid sequence that is at least 75%, 80%, 85%, 90%, 91%, 92%, 93%, 94%, 95%, 96%, 97%, 98%, 99%, or 100% identical to the amino acid sequence of SEQ ID NO: 494. In some embodiments, the polypeptide comprises a V substitution at the position corresponding to L57 of SEQ ID NO: 2, a D substitution at the position corresponding to F82 of SEQ ID NO: 2, and an R substitution at the position corresponding to N83 of SEQ ID NO: 2. In some embodiments, the polypeptide comprises an amino acid sequence that is at least 75%, 80%, 85%, 90%, 91%, 92%, 93%, 94%, 95%, 96%, 97%, 98%, 99%, or 100% identical to the amino acid sequence of SEQ ID NO: 495. In some embodiments, the polypeptide comprises an amino acid sequence that is at least 75%, 80%, 85%, 90%, 91%, 92%, 93%, 94%, 95%, 96%, 97%, 98%, 99%, or 100% identical to the amino acid sequence of SEQ ID NO: 497. In some embodiments, the polypeptide comprises a V substitution at the position corresponding to L57 of SEQ ID NO: 2, a Y substitution at the position corresponding to F82 of SEQ ID NO: 2, and an R substitution at the position corresponding to N83 of SEQ ID NO: 2. In some embodiments, the polypeptide comprises an amino acid sequence that is at least 75%, 80%, 85%, 90%, 91%, 92%, 93%, 94%, 95%, 96%, 97%, 98%, 99%, or 100% identical to the amino acid sequence of SEQ ID NO: 498. In some embodiments, the polypeptide comprises an amino acid sequence that is at least 75%, 80%, 85%, 90%, 91%, 92%, 93%, 94%, 95%, 96%, 97%, 98%, 99%, or 100% identical to the amino acid sequence of SEQ ID NO: 500. In some embodiments, the polypeptide comprises an R substitution at the position corresponding to G68 of SEQ ID NO: 2, a Y substitution at the position corresponding to W78 of SEQ ID NO: 2, and a Y substitution at the position corresponding to F82 of SEQ ID NO: 2. In some embodiments, the polypeptide comprises an amino acid sequence that is at least 75%, 80%, 85%, 90%, 91%, 92%, 93%, 94%, 95%, 96%, 97%, 98%, 99%, or 100% identical to the amino acid sequence of SEQ ID NO: 501. In some embodiments, the polypeptide comprises an amino acid sequence that is at least 75%, 80%, 85%, 90%, 91%, 92%, 93%, 94%, 95%, 96%, 97%, 98%, 99%, or 100% identical to the amino acid sequence of SEQ ID NO: 503. In some embodiments, the polypeptide comprises an R substitution at the position corresponding to G68 of SEQ ID NO: 2, an S substitution at the position corresponding to F82 of SEQ ID NO: 2, and an R substitution at the position corresponding to N83 of SEQ ID NO: 2. In some embodiments, the polypeptide comprises an amino acid sequence that is at least 75%, 80%, 85%, 90%, 91%, 92%, 93%, 94%, 95%, 96%, 97%, 98%, 99%, or 100% identical to the amino acid sequence of SEQ ID NO: 504. In some embodiments, the polypeptide comprises an amino acid sequence that is at least 75%, 80%, 85%, 90%, 91%, 92%, 93%, 94%, 95%, 96%, 97%, 98%, 99%, or 100% identical to the amino acid sequence of SEQ ID NO: 506. In some embodiments, the polypeptide comprises an N substitution at the position corresponding to E52 of SEQ ID NO: 2, an R substitution at the position corresponding to G68 of SEQ ID NO: 2, an Y substitution at the position corresponding to F82 of SEQ ID NO: 2, and an R substitution at the position corresponding to N83 of SEQ ID NO: 2. In some embodiments, the polypeptide comprises an amino acid sequence that is at least 75%, 80%, 85%, 90%, 91%, 92%, 93%, 94%, 95%, 96%, 97%, 98%, 99%, or 100% identical to the amino acid sequence of SEQ ID NO: 507. In some embodiments, the polypeptide comprises an amino acid sequence that is at least 75%, 80%, 85%, 90%, 91%, 92%, 93%, 94%, 95%, 96%, 97%, 98%, 99%, or 100% identical to the amino acid sequence of SEQ ID NO: 509. In some embodiments, the polypeptide comprises an R substitution at the position corresponding to G68 of SEQ ID NO: 2, an E substitution at the position corresponding to L79 of SEQ ID NO: 2, a T substitution at the position corresponding to F82 of SEQ ID NO: 2, and an R substitution at the position corresponding to N83 of SEQ ID NO: 2. In some embodiments, the polypeptide comprises an amino acid sequence that is at least 75%, 80%, 85%, 90%, 91%, 92%, 93%, 94%, 95%, 96%, 97%, 98%, 99%, or 100% identical to the amino acid sequence of SEQ ID NO: 510. In some embodiments, the polypeptide comprises an amino acid sequence that is at least 75%, 80%, 85%, 90%, 91%, 92%, 93%, 94%, 95%, 96%, 97%, 98%, 99%, or 100% identical to the amino acid sequence of SEQ ID NO: 512. In some embodiments, the polypeptide comprises an R substitution at the position corresponding to G68 of SEQ ID NO: 2, an E substitution at the position corresponding to L79 of SEQ ID NO: 2, a Y substitution at the position corresponding to F82 of SEQ ID NO: 2, and an R substitution at the position correspondingto N83 of SEQ ID NO: 2. In some embodiments, the polypeptide comprises an amino acid sequence that is at least 75%, 80%, 85%, 90%, 91%, 92%, 93%, 94%, 95%, 96%, 97%, 98%, 99%, or 100% identical to the amino acid sequence of SEQ ID NO: 513. In some embodiments, the polypeptide comprises an amino acid sequence that is at least 75%, 80%, 85%, 90%, 91%, 92%, 93%, 94%, 95%, 96%, 97%, 98%, 99%, or 100% identical to the amino acid sequence of SEQ ID NO: 515. In some embodiments, the polypeptide comprises an R substitution at the position corresponding to G68 of SEQ ID NO: 2, a T substitution at the position corresponding to L79 of SEQ ID NO: 2, a T substitution at the position corresponding to F82 of SEQ ID NO: 2, and an R substitution at the position corresponding to N83 of SEQ ID NO: 2.

[0007] In some embodiments of the present disclosure, the polypeptide displays a significant reduction in activin A binding, a significant reduction in GDF11 binding, no detected BMP10 binding, a minor reduction in BMP6 binding, and a significant reduction in BMP9 binding, compared to binding profiles of an unmodified ActRIIB-Fc protein. In some embodiments, the polypeptide displays near-WT levels of activin B binding, compared to binding profiles of an unmodified ActRIIB-Fc protein.

[0008] In some embodiments of the present disclosure, the polypeptide displays a significant reduction in activin A binding, near-WT levels of GDF11 binding, near-WT levels of BMP10 binding, and a slight increase in BMP6 binding, and a modest reduction in BMP9 binding, compared to binding profiles of an unmodified ActRIIB-Fc protein. In some embodiments, the polypeptide displays near-WT levels of activin B binding, compared to binding profiles of an unmodified ActRIIB-Fc protein.

[0009] In some embodiments of the present disclosure, the polypeptide displays a significant reduction in activin A binding, near-WT levels of GDF11 binding, a minor reduction in BMP10 binding, near-WT levels of BMP6 binding, and a minor reduction in BMP9 binding, compared to binding profiles of an unmodified ActRIIB-Fc protein. In some embodiments, the polypeptide displays near-WT levels of activin B binding, compared to binding profiles of an unmodified ActRIIB-Fc protein.

[0010] In some embodiments of the present disclosure, the polypeptide displays a modest reduction in activin A binding, a significant reduction in GDF11 binding, no detectable BMP10 binding, a minor reduction in BMP6 binding, and a significant reduction in BMP9 binding, compared to binding profiles of an unmodified ActRIIB-Fc protein. In some embodiments, the polypeptide displays near-WT levels of activin B binding, compared to binding profiles of an unmodified ActRIIB-Fc protein.

[0011] In some embodiments of the present disclosure, the polypeptide displays modest reduction in activin A binding, a significant reduction in GDF11 binding, no detectable BMP10 binding, a minor reduction in BMP6 binding, and a significant reduction in BMP9 binding, compared to binding profiles of an unmodified ActRIIB-Fc protein. In some embodiments, the polypeptide displays a modest reduction in activin B binding, compared to binding profiles of an unmodified ActRIIB-Fc protein.

[0012] In some embodiments of the present disclosure, the polypeptide displays modest reduction in activin A binding, a significant reduction in GDF11 binding, no detectable BMP10 binding, a significant reduction in BMP6 binding, and a significant reduction in BMP9 binding, compared to binding profiles of an unmodified ActRIIB-Fc protein. In some embodiments, the polypeptide displays modest reduction in activin B binding, compared to binding profiles of an unmodified ActRIIB-Fc protein.

[0013] In some embodiments of the present disclosure, the polypeptide displays a modest reduction in activin A binding, a significant reduction in GDF11 binding, no detectable BMP10 binding, a minor reduction in BMP6 binding, and a significant reduction in BMP9 binding, compared to binding profiles of an unmodified ActRIIB-Fc protein. In some embodiments, the polypeptide displays near-WT levels of activin B binding, compared to binding profiles of an unmodified ActRIIB-Fc protein.

[0014] In some embodiments of the present disclosure, the polypeptide displays a modest reduction in activin A binding, a significant reduction in GDF11 binding, minimal BMP10 binding, a minor reduction in BMP6 binding, and a significant reduction in BMP9 binding, compared to binding profiles of an unmodified ActRIIB-Fc protein. In some embodiments, the polypeptide displays near-WT levels of activin B binding, compared to binding profiles of an unmodified ActRIIB-Fc protein.

[0015] In some embodiments of the present disclosure, the polypeptide displays a modest reduction in activin A binding, a significant reduction in GDF11 binding, minimal BMP10 binding, a minor reduction in BMP6 binding, and a significant reduction in BMP9 binding, compared to binding profiles of an unmodified ActRIIB-Fc protein. In some embodiments, the polypeptide displays a modest reduction in activin B binding, compared to binding profiles of an unmodified ActRIIB-Fc protein.

[0016] In some embodiments of the present disclosure, the polypeptide displays a modest reduction in activin A binding, a significant reduction in GDF11 binding, minimal BMP10 binding, a modest reduction in BMP6 binding, and a significant reduction in BMP9 binding, compared to binding profiles of an unmodified ActRIIB-Fc protein. In some embodiments, the polypeptide displays a modest reduction in activin A binding, compared to binding profiles of an unmodified ActRIIB-Fc protein.

[0017] In some embodiments of the present disclosure, the polypeptide displays a modest reduction in activin A binding, a significant reduction in GDF11 binding, a modest reduction in BMP10 binding, a minor reduction in BMP6 binding, and a significant reduction in BMP9 binding, compared to binding profiles of an unmodified ActRIIB-Fc protein. In some embodiments, the polypeptide displays near-WT levels of activin B binding, compared to binding profiles of an unmodified ActRIIB-Fc protein.

[0018] In some embodiments of the present disclosure, the polypeptide displays a modest reduction in activin A binding, a significant reduction in GDF11 binding, a modest reduction in BMP10 binding, minimal BMP6 binding, and a significant reduction in BMP9 binding, compared to binding profiles of an unmodified ActRIIB-Fc protein. In some embodiments, the polypeptide displays near-WT levels of activin B binding, compared to binding profiles of an unmodified ActRIIB-Fc protein.

[0019] In some embodiments of the present disclosure, the polypeptide displays a modest reduction in activin A binding, a significant reduction in GDF11 binding, a modest reduction in BMP10 binding, minimal BMP6 binding, and a modest reduction in BMP9 binding, compared to binding profiles of an unmodified ActRIIB-Fc protein. In some embodiments, the polypeptide displays a modest reduction in activin B binding, compared to binding profiles of an unmodified ActRIIB-Fc protein.

[0020] In some embodiments of the present disclosure, the polypeptide displays a modest reduction in activin A binding, a modest reduction in GDF11 binding, no detectable BMP10 binding, a minor reduction in BMP6 binding, and a significant reduction in BMP9 binding, compared to binding profiles of an unmodified ActRIIB-Fc protein. In some embodiments, the polypeptide displays a minor reduction in activin B binding, compared to binding profiles of an unmodified ActRIIB-Fc protein.

[0021] In some embodiments of the present disclosure, the polypeptide displays a modest reduction in activin A binding, near-WT levels of GDF11 binding, near-WT levels of BMP10 binding, a slight increase in BMP6 binding, and near-WT levels of BMP9 binding, compared to binding profiles of an unmodified ActRIIB-Fc protein. In some embodiments, the polypeptide displays near-WT levels of activin B binding, compared to binding profiles of an unmodified ActRIIB-Fc protein.

[0022] In some embodiments of the present disclosure, the polypeptide displays a modest reduction in activin A binding, near-WT levels of GDF11 binding, near-WT levels of BMP10 binding, a slight increase in BMP6 binding, and near-WT levels of BMP9 binding, compared to binding profiles of an unmodified ActRIIB-Fc protein. In some embodiments, the polypeptide displays a modest reduction in activin B binding, compared to binding profiles of an unmodified ActRIIB-Fc protein.

[0023] In some embodiments of the present disclosure, the polypeptide displays a minor reduction in activin A binding, a modest reduction in GDF11 binding, a modest reduction in BMP10 binding, a significant reduction in BMP6 binding, and s significant reduction in BMP9 binding, compared to binding profiles of an unmodified ActRIIB-Fc protein. In some embodiments, the polypeptide displays near-WT levels of activin B binding, compared to binding profiles of an unmodified ActRIIB-Fc protein.

[0024] In some embodiments of the present disclosure, the polypeptide displays near-WT levels of activin A binding, near-WT levels of GDF11 binding, a modest reduction in BMP10 binding, a modest reduction in BMP6 binding, and a modest reduction in BMP9 binding, compared to binding profiles of an unmodified ActRIIB-Fc protein. In some embodiments, the polypeptide displays a minor reduction in activin B binding, compared to binding profiles of an unmodified ActRIIB-Fc protein.

[0025] In some embodiments of the present disclosure, the polypeptide displays near-WT levels of activin A binding, near-WT levels of GDF11 binding, near-WT levels of BMP10 binding, a minimal binding to BMP6, and a minor reduction in BMP9 binding, compared to binding profiles of an unmodified ActRIIB-Fc protein. In some embodiments, the polypeptide displays near-WT levels of activin B binding, compared to binding profiles of an unmodified ActRIIB-Fc protein.

[0026] In some embodiments of the present disclosure, the polypeptide displays near-WT levels of activin A binding, near-WT levels of GDF11 binding, near-WT levels of BMP10 binding, near-WT levels of BMP6 binding, and a minor reduction in BMP9 binding, compared to binding profiles of an unmodified ActRIIB-Fc protein. In some embodiments, the polypeptide displays near-WT levels of activin B binding, compared to binding profiles of an unmodified ActRIIB-Fc protein.

[0027] In some embodiments of the present disclosure, the polypeptide displays near-WT levels of activin A binding, near-WT levels of GDF11 binding, near-WT levels of BMP10 binding, near-WT levels of BMP6 binding, and near-WT levels of BMP9 binding, compared to binding profiles of an unmodified ActRIIB-Fc protein. In some embodiments, the polypeptide displays near-WT levels of activin B binding, compared to binding profiles of an unmodified ActRIIB-Fc protein.

[0028] In some embodiments of the present disclosure, the polypeptide displays near-WT levels of activin A binding, near-WT levels of GDF11 binding, near-WT levels of BMP10 binding, near-WT levels of BMP6 binding, and a modest reduction in BMP9 binding, compared to binding profiles of an unmodified ActRIIB-Fc protein. In some embodiments, the polypeptide displays a minor reduction in activin B binding, compared to binding profiles of an unmodified ActRIIB-Fc protein.

[0029] In some embodiments of the present disclosure, the polypeptide displays near-WT levels of activin A binding, near-WT levels of GDF11 binding, a minor reduction in BMP10 binding, near-WT levels of BMP6 binding, and a modest reduction in BMP9 binding, compared to binding profiles of an unmodified ActRIIB-Fc protein. In some embodiments, the polypeptide displays a minor reduction in activin B binding, compared to binding profiles of an unmodified ActRIIB-Fc protein.

[0030] In some embodiments of the present disclosure, the polypeptide displays near-WT levels of activin A binding, near-WT levels of GDF11 binding, a minor reduction in BMP10 binding, near-WT levels of BMP6 binding, and a modest reduction in BMP9 binding, compared to binding profiles of an unmodified ActRIIB-Fc protein. In some embodiments, the polypeptide displays near-WT levels of activin B binding, compared to binding profiles of an unmodified ActRIIB-Fc protein.

[0031] In some embodiments of the present disclosure, the polypeptide displays near-WT levels of activin A binding, near-WT levels of GDF11 binding, near-WT levels of BMP10 binding, a minor reduction in BMP6 binding, and a modest reduction in BMP9 binding, compared to binding profiles of an unmodified ActRIIB-Fc protein. In some embodiments, the polypeptide displays a minor reduction in activin B binding, compared to binding profiles of an unmodified ActRIIB-Fc protein.

[0032] In some embodiments of the present disclosure, the polypeptide is a homodimer protein.

[0033] In certain aspects, the present disclosure relates to a heteromultimer protein comprising a variant ActRIIB polypeptide and an ALK4 polypeptide, wherein the variant ActRIIB polypeptide comprises an amino acid sequence that is at least 75%, 80%, 85%, 90%, 91%, 92%, 93%, 94%, 95%, 96%, 97%, 98%, 99%, or 100% identical to an amino acid sequence that begins at any one of amino acids 20-29 (e.g., amino acid residues 20, 21, 22, 23, 24, 25, 26, 27, 28, or 29) of SEQ ID NO: 2 and ends at any one of amino acids 109-134 (e.g., amino acid residues 109, 110, 111, 112, 113, 114, 115, 116, 117, 118, 119, 120, 121, 122, 123, 124, 125, 126, 127, 128, 129, 130, 131, 132, 133, or 134) of SEQ ID NO: 2 and one or more amino acid substitutions at a position of SEQ ID NO: 2 selected from the group consisting of: L38N, E50L, E52N, L57E, L57I, L57R, L57T, L57V, Y60D, G68R, K74E, W78Y, L79F, L79S, L79T, L79W, F82D, F82E, F82L, F82S, F82T, F82Y, N83R, E94K, and V99G. In certain aspects, the present disclosure relates to a heteromultimer protein comprising a variant ActRIIB polypeptide and an ALK7 polypeptide, wherein the variant ActRIIB polypeptide comprises an amino acid sequence that is at least 75%, 80%, 85%, 90%, 91%, 92%, 93%, 94%, 95%, 96%, 97%, 98%, 99%, or 100% identical to an amino acid sequence that begins at any one of amino acids 20-29 (e.g., amino acid residues 20, 21, 22, 23, 24, 25, 26, 27, 28, or 29) of SEQ ID NO: 2 and ends at any one of amino acids 109-134 (e.g., amino acid residues 109, 110, 111, 112, 113, 114, 115, 116, 117, 118, 119, 120, 121, 122, 123, 124, 125, 126, 127, 128, 129, 130, 131, 132, 133, or 134) of SEQ ID NO: 2 and one or more amino acid substitutions at a position of SEQ ID NO: 2 selected from the group consisting of: L38N, E50L, E52N, L57E, L57I, L57R, L57T, L57V, Y60D, G68R, K74E, W78Y, L79F, L79S, L79T, L79W, F82D, F82E, F82L, F82S, F82T, F82Y, N83R, E94K, and V99G. In certain aspects, the present disclosure relates to a heteromultimer protein comprising a variant ActRIIB polypeptide and an ALK4 polypeptide, wherein the variant ActRIIB polypeptide comprises an amino acid sequence that is at least 75%, 80%, 85%, 90%, 91%, 92%, 93%, 94%, 95%, 96%, 97%, 98%, 99%, or 100% identical to an amino acid sequence that begins at any one of amino acids 20-29 (e.g., amino acid residues 20, 21, 22, 23, 24, 25, 26, 27, 28, or 29) of SEQ ID NO: 2 and ends at any one of amino acids 109-134 (e.g., amino acid residues 109, 110, 111, 112, 113, 114, 115, 116, 117, 118, 119, 120, 121, 122, 123, 124, 125, 126, 127, 128, 129, 130, 131, 132, 133, or 134) of SEQ ID NO: 2 and one or more amino acid substitutions at a position of SEQ ID NO: 2 selected from the group consisting of: L38N, E50L, E52D, E52N, E52Y, K55A, K55E, L57E, L57I, L57R, L57T, L57V, Y60D, G68R, K74E, W78Y, L79E, L79F, L79H, L79R, L79S, L79T, L79W, F82D, F82E, F82I, F82K, F82L, F82S, F82T, F82Y, N83R, E94K, and V99G. In certain aspects, the present disclosure relates to a heteromultimer protein comprising a variant ActRIIB polypeptide and an ALK7 polypeptide, wherein the variant ActRIIB polypeptide comprises an amino acid sequence that is at least 75%, 80%, 85%, 90%, 91%, 92%, 93%, 94%, 95%, 96%, 97%, 98%, 99%, or 100% identical to an amino acid sequence that begins at any one of amino acids 20-29 (e.g., amino acid residues 20, 21, 22, 23, 24, 25, 26, 27, 28, or 29) of SEQ ID NO: 2 and ends at any one of amino acids 109-134 (e.g., amino acid residues 109, 110, 111, 112, 113, 114, 115, 116, 117, 118, 119, 120, 121, 122, 123, 124, 125, 126, 127, 128, 129, 130, 131, 132, 133, or 134) of SEQ ID NO: 2 and one or more amino acid substitutions at a position of SEQ ID NO: 2 selected from the group consisting of: L38N, E50L, E52D, E52N, E52Y, K55A, K55E, L57E, L57I, L57R, L57T, L57V, Y60D, G68R, K74E, W78Y,L79E, L79F, L79H, L79R, L79S, L79T, L79W, F82D, F82E, F82I, F82K, F82L, F82S,F82T, F82Y, N83R, E94K, and V99G.

[0034] In certain aspects, the present disclosure relates to a heteromultimer protein comprising a variant ActRIIB polypeptide and an ALK4 polypeptide, wherein the variant ActRIIB polypeptide comprises an amino acid sequence that is at least 75%, 80%, 85%, 90%, 91%, 92%, 93%, 94%, 95%, 96%, 97%, 98%, 99%, or 100% identical to an amino acid sequence that begins at any one of amino acids 20-29 (e.g., amino acid residues 20, 21, 22, 23, 24, 25, 26, 27, 28, or 29) of SEQ ID NO: 2 and ends at any one of amino acids 109-134 (e.g., amino acid residues 109, 110, 111, 112, 113, 114, 115, 116, 117, 118, 119, 120, 121, 122, 123, 124, 125, 126, 127, 128, 129, 130, 131, 132, 133, or 134) of SEQ ID NO: 2 and one or more amino acid substitutions at a position of SEQ ID NO: 2 selected from the group consisting of: A24N, S26T, N35E, E37A, E37D, L38N, R40A, R40K, S44T, L46V, L46I, L46F, L46A, E50K, E50P, E50L, E52A, E52D, E52G, E52H, E52K, E52N, E52P, E52R, E52S, E52T, E52Y, Q53R, Q53K, Q53N, Q53H, D54A, K55A, K55D, K55E, K55R, R56A, L57E, L57I, L57R, L57T, L57V, Y60D, Y60F, Y60K, Y60P, R64A, R64H, R64K, R64N, N65A, S67N, S67T, G68R, K74A, K74E, K74F, K74I, K74R, K74Y, W78A, W78Y, L79A, L79D, L79E, L79F, L79H, L79K, L79P, L79R, L79S, L79T, L79W, D80A, D80F, D80G, D80I, D80K, D80M, D80N, D80R, F82A, F82D, F82E, F82I, F82K, F82L, F82S, F82T, F82W, F82Y, N83A, N83R, T93D, T93E, T93G, T93H, T93K, T93P, T93R, T93S, T93Y, E94K, Q98D, Q98E, Q98K, Q98R, V99E, V99G, V99K, E105N, F108I, F108L, F108V, F108Y, E111D, E111H, E111K, 111N, E111Q, E111R, R112H, R112K, R112N, R112S, R112T, A119P, A119V, G120N, E123N, P129N, P129S, P130A, P130R, and A132N.

[0035] In certain aspects, the present disclosure relates to a heteromultimer protein comprising a variant ActRIIB polypeptide and an ALK7 polypeptide, wherein the variant ActRIIB polypeptide comprises an amino acid sequence that is at least 75%, 80%, 85%, 90%, 91%, 92%, 93%, 94%, 95%, 96%, 97%, 98%, 99%, or 100% identical to an amino acid sequence that begins at any one of amino acids 20-29 (e.g., amino acid residues 20, 21, 22, 23, 24, 25, 26, 27, 28, or 29) of SEQ ID NO: 2 and ends at any one of amino acids 109-134 (e.g., amino acid residues 109, 110, 111, 112, 113, 114, 115, 116, 117, 118, 119, 120, 121, 122, 123, 124, 125, 126, 127, 128, 129, 130, 131, 132, 133, or 134) of SEQ ID NO: 2 and one or more amino acid substitutions at a position of SEQ ID NO: 2 selected from the group consisting of: A24N, S26T, N35E, E37A, E37D, L38N, R40A, R40K, S44T, L46V, L46I, L46F, L46A, E50K, E50P, E50L, E52A, E52D, E52G, E52H, E52K, E52N, E52P, E52R, E52S, E52T, E52Y, Q53R, Q53K, Q53N, Q53H, D54A, K55A, K55D, K55E, K55R, R56A, L57E, L57I, L57R, L57T, L57V, Y60D, Y60F, Y60K, Y60P, R64A, R64H, R64K, R64N, N65A, S67N, S67T, G68R, K74A, K74E, K74F, K74I, K74R, K74Y, W78A, W78Y, L79A, L79D, L79E, L79F, L79H, L79K, L79P, L79R, L79S, L79T, L79W, D80A, D80F, D80G, D80I, D80K, D80M, D80N, D80R, F82A, F82D, F82E, F82I, F82K, F82L, F82S, F82T, F82W, F82Y, N83A, N83R, T93D, T93E, T93G, T93H, T93K, T93P, T93R, T93S, T93Y, E94K, Q98D, Q98E, Q98K, Q98R, V99E, V99G, V99K, E105N, F108I, F108L, F108V, F108Y, E111D, E111H, E111K, 111N, E111Q, E111R, R112H, R112K, R112N, R112S, R112T, A119P, A119V, G120N, E123N, P129N, P129S, P130A, P130R, and A132N.56. The heteromultimer of any one of claims 52-55, wherein the variant ActRIIB polypeptide comprises an amino acid sequence that is at least 75%, 80%, 85%, 90%, 91%, 92%, 93%, 94%, 95%, 96%, 97%, 98%, 99%, or 100% identical to amino acids 29-109 of SEQ ID NO: 2.

[0036] In some embodiments, the variant ActRIIB polypeptide comprises an amino acid sequence that is at least 75%, 80%, 85%, 90%, 91%, 92%, 93%, 94%, 95%, 96%, 97%, 98%, 99%, or 100% identical to amino acids 29-109 of SEQ ID NO: 2. In some embodiments, the variant ActRIIB polypeptide comprises an amino acid sequence that is at least 75%, 80%, 85%, 90%, 91%, 92%, 93%, 94%, 95%, 96%, 97%, 98%, 99%, or 100% identical to amino acids 25-131 of SEQ ID NO: 2. In some embodiments, the variant ActRIIB polypeptide comprises an amino acid sequence that is at least 75%, 80%, 85%, 90%, 91%, 92%, 93%, 94%, 95%, 96%, 97%, 98%, 99%, or 100% identical to amino acids 20-134 of SEQ ID NO: 2. In some embodiments, the variant ActRIIB polypeptide comprises an amino acid sequence that is at least 75%, 80%, 85%, 90%, 91%, 92%, 93%, 94%, 95%, 96%, 97%, 98%, 99%, or 100% identical to the amino acid sequence of SEQ ID NO: 53. In some embodiments, the variant ActRIIB polypeptide comprises one or more amino acid substitution with respect to the amino acid sequence of SEQ ID NO: 2 selected from the group consisting of: L38N, E50L, E52D, E52N, E52Y, L57E, L57I, L57R, L57T, L57V, Y60D, G68R, K74E, W78Y, L79E, L79F, L79H, L79R, L79S, L79T, L79W, F82D, F82E, F82I, F82K, F82L, F82S, F82T, F82Y, N83R, E94K, and V99G. In some embodiments, the variant ActRIIB polypeptide comprises one or more amino acid substitution with respect to the amino acid sequence of SEQ ID NO: 2 selected from the group consisting of: A24N, S26T, N35E, E37A, E37D, L38N, R40A, R40K, S44T, L46V, L46I, L46F, L46A, E50K, E50P, E50L, E52A, E52D, E52G, E52H, E52K, E52N, E52P, E52R, E52S, E52T, E52Y, Q53R, Q53K, Q53N, Q53H, D54A, K55A, K55D, K55E, K55R, R56A, L57E, L57I, L57R, L57T, L57V, Y60D, Y60F, Y60K, Y60P, R64A, R64H, R64K, R64N, N65A, S67N, S67T, G68R, K74A, K74E, K74F, K74I, K74R, K74Y, W78A, W78Y, L79A, L79D, L79E, L79F, L79H, L79K, L79P, L79R, L79S, L79T, L79W, D80A, D80F, D80G, D80I, D80K, D80M, D80N, D80R, F82A, F82D, F82E, F82I, F82K, F82L, F82S, F82T, F82W, F82Y, N83A, N83R, T93D, T93E, T93G, T93H, T93K, T93P, T93R, T93S, T93Y, E94K, Q98D, Q98E, Q98K, Q98R, V99E, V99G, V99K, E105N, F108I, F108L, F108V, F108Y, E111D, E111H, E111K, 111N, E111Q, E111R, R112H, R112K, R112N, R112S, R112T, A119P, A119V, G120N, E123N, P129N, P129S, P130A, P130R, and A132N.

[0037] In some embodiments, the ALK4 polypeptide comprises an amino acid sequence that is at least 75%, 80%, 85%, 90%, 91%, 92%, 93%, 94%, 95%, 96%, 97%, 98%, 99%, or 100% identical to an amino acid sequence selected from the group consisting of SEQ ID NOs: 84, 85, 86, 87, 88, 89, 92, 93, 247, and 249. In some embodiments, the ALK7 polypeptide comprises an amino acid sequence that is at least 75%, 80%, 85%, 90%, 91%, 92%, 93%, 94%, 95%, 96%, 97%, 98%, 99%, or 100% identical to an amino acid sequence selected from the group consisting of SEQ ID NOs: 120, 121, 122, 123, 124, 125, 126, 127, 128, 129, 130, 133, and 134. In some embodiments, the variant ActRIIB polypeptide is a fusion protein comprising an ActRIIB polypeptide domain and one or more heterologous domains. In some embodiments, the ALK4 polypeptide is a fusion protein comprising an ALK4 polypeptide domain and one or more heterologous domains. In some embodiments, the ALK7 polypeptide is a fusion protein comprising an ALK7 polypeptide domain and one or more heterologous domains. In some embodiments, the variant ActRIIB polypeptide is an ActRIIB-Fc fusion protein. In some embodiments, the ALK4 polypeptide is an ALK4-Fc fusion protein. In some embodiments, the ALK7 polypeptide is an ALK7-Fc fusion protein. In some embodiments, the variant ActRIIB-Fc fusion protein further comprises a linker domain positioned between the ActRIIB polypeptide domain and the one or more heterologous domains or Fc domain. In some embodiments, the ALK4-Fc fusion protein further comprises a linker domain positioned between the ALK4 polypeptide domain and the one or more heterologous domains or Fc domain. In some embodiments, the ALK7-Fc fusion protein further comprises a linker domain positioned between the ALK7 polypeptide domain and the one or more heterologous domains or Fc domain. In some embodiments, the linker domain is selected from: TGGG, TGGGG, SGGGG, GGGGS, GGG, GGGG, SGGG, and GGGGS. In some embodiments, the heteromultimer comprises an Fc domain selected from: (a) The variant ActRIIB-Fc fusion protein comprises an Fc domain that is at least 75%, 80%, 85%, 90%, 91%, 92%, 93%, 94%, 95%, 96%, 97%, 98%, 99%, or 100% identical to the amino acid sequence of SEQ ID NO: 13, and the ALK4-Fc fusion protein comprises an Fc domain that is at least 75%, 80%, 85%, 90%, 91%, 92%, 93%, 94%, 95%, 96%, 97%, 98%, 99%, or 100% identical to the amino acid sequence of SEQ ID NO: 13; (b) The variant ActRIIB-Fc fusion protein comprises an Fc domain that is at least 75%, 80%, 85%, 90%, 91%, 92%, 93%, 94%, 95%, 96%, 97%, 98%, 99%, or 100% identical to the amino acid sequence of SEQ ID NO: 14, and the ALK4-Fc fusion protein comprises an Fc domain that is at least 75%, 80%, 85%, 90%, 91%, 92%, 93%, 94%, 95%, 96%, 97%, 98%, 99%, or 100% identical to the amino acid sequence of SEQ ID NO: 14; (c) The variant ActRIIB-Fc fusion protein comprises an Fc domain that is at least 75%, 80%, 85%, 90%, 91%, 92%, 93%, 94%, 95%, 96%, 97%, 98%, 99%, or 100% identical to the amino acid sequence of SEQ ID NO: 15, and the ALK4-Fc fusion protein comprises an Fc domain that is at least 75%, 80%, 85%, 90%, 91%, 92%, 93%, 94%, 95%, 96%, 97%, 98%, 99%, or 100% identical to the amino acid sequence of SEQ ID NO: 15; (d) The variant ActRIIB-Fc fusion protein comprises an Fc domain that is at least 75%, 80%, 85%, 90%, 91%, 92%, 93%, 94%, 95%, 96%, 97%, 98%, 99%, or 100% identical to the amino acid sequence of SEQ ID NO: 16, and the ALK4-Fc fusion protein comprises an Fc domain that is at least 75%, 80%, 85%, 90%, 91%, 92%, 93%, 94%, 95%, 96%, 97%, 98%, 99%, or 100% identical to the amino acid sequence of SEQ ID NO: 16; and (e) The variant ActRIIB-Fc fusion protein comprises an Fc domain that is at least 75%, 80%, 85%, 90%, 91%, 92%, 93%, 94%, 95%, 96%, 97%, 98%, 99%, or 100% identical to the amino acid sequence of SEQ ID NO: 17, and the ALK4-Fc fusion protein comprises an Fc domain that is at least 75%, 80%, 85%, 90%, 91%, 92%, 93%, 94%, 95%, 96%, 97%, 98%, 99%, or 100% identical to the amino acid sequence of SEQ ID NO: 17. In some embodiments, the heteromultimer comprises an Fc domain selected from: (a) The variant ActRIIB-Fc fusion protein comprises an Fc domain that is at least 75%, 80%, 85%, 90%, 91%, 92%, 93%, 94%, 95%, 96%, 97%, 98%, 99%, or 100% identical to the amino acid sequence of SEQ ID NO: 13, and the ALK7-Fc fusion protein comprises an Fc domain that is at least 75%, 80%, 85%, 90%, 91%, 92%, 93%, 94%, 95%, 96%, 97%, 98%, 99%, or 100% identical to the amino acid sequence of SEQ ID NO: 13; (b) The variant ActRIIB-Fc fusion protein comprises an Fc domain that is at least 75%, 80%, 85%, 90%, 91%, 92%, 93%, 94%, 95%, 96%, 97%, 98%, 99%, or 100% identical to the amino acid sequence of SEQ ID NO: 14, and the ALK7-Fc fusion protein comprises an Fc domain that is at least 75%, 80%, 85%, 90%, 91%, 92%, 93%, 94%, 95%, 96%, 97%, 98%, 99%, or 100% identical to the amino acid sequence of SEQ ID NO: 14; (c) The variant ActRIIB-Fc fusion protein comprises an Fc domain that is at least 75%, 80%, 85%, 90%, 91%, 92%, 93%, 94%, 95%, 96%, 97%, 98%, 99%, or 100% identical to the amino acid sequence of SEQ ID NO: 15, and the ALK7-Fc fusion protein comprises an Fc domain that is at least 75%, 80%, 85%, 90%, 91%, 92%, 93%, 94%, 95%, 96%, 97%, 98%, 99%, or 100% identical to the amino acid sequence of SEQ ID NO: 15; (d) The variant ActRIIB-Fc fusion protein comprises an Fc domain that is at least 75%, 80%, 85%, 90%, 91%, 92%, 93%, 94%, 95%, 96%, 97%, 98%, 99%, or 100% identical to the amino acid sequence of SEQ ID NO: 16, and the ALK7-Fc fusion protein comprises an Fc domain that is at least 75%, 80%, 85%, 90%, 91%, 92%, 93%, 94%, 95%, 96%, 97%, 98%, 99%, or 100% identical to the amino acid sequence of SEQ ID NO: 16; and (e) The variant ActRIIB-Fc fusion protein comprises an Fc domain that is at least 75%, 80%, 85%, 90%, 91%, 92%, 93%, 94%, 95%, 96%, 97%, 98%, 99%, or 100% identical to the amino acid sequence of SEQ ID NO: 17, and the ALK7-Fc fusion protein comprises an Fc domain that is at least 75%, 80%, 85%, 90%, 91%, 92%, 93%, 94%, 95%, 96%, 97%, 98%, 99%, or 100% identical to the amino acid sequence of SEQ ID NO: 17. In some embodiments, the heteromultimer comprises an Fc domain selected from: (a) The variant ActRIIB-Fc fusion protein comprises an Fc domain that is at least 75%, 80%, 85%, 90%, 91%, 92%, 93%, 94%, 95%, 96%, 97%, 98%, 99%, or 100% identical to the amino acid sequence of SEQ ID NO: 18, and the ALK4-Fc fusion protein comprises an Fc domain that is at least 75%, 80%, 85%, 90%, 91%, 92%, 93%, 94%, 95%, 96%, 97%, 98%, 99%, or 100% identical to the amino acid sequence of SEQ ID NO: 19; and (b) The variant ActRIIB-Fc fusion protein comprises an Fc domain that is at least 75%, 80%, 85%, 90%, 91%, 92%, 93%, 94%, 95%, 96%, 97%, 98%, 99%, or 100% identical to the amino acid sequence of SEQ ID NO: 19, and the ALK4-Fc fusion protein comprises an Fc domain that is at least 75%, 80%, 85%, 90%, 91%, 92%, 93%, 94%, 95%, 96%, 97%, 98%, 99%, or 100% identical to the amino acid sequence of SEQ ID NO: 18. In some embodiments, the heteromultimer comprises an Fc domain selected from: (a) The variant ActRIIB-Fc fusion protein comprises an Fc domain that is at least 75%, 80%, 85%, 90%, 91%, 92%, 93%, 94%, 95%, 96%, 97%, 98%, 99%, or 100% identical to the amino acid sequence of SEQ ID NO: 18, and the ALK7-Fc fusion protein comprises an Fc domain that is at least 75%, 80%, 85%, 90%, 91%, 92%, 93%, 94%, 95%, 96%, 97%, 98%, 99%, or 100% identical to the amino acid sequence of SEQ ID NO: 19; and (b) The variant ActRIIB-Fc fusion protein comprises an Fc domain that is at least 75%, 80%, 85%, 90%, 91%, 92%, 93%, 94%, 95%, 96%, 97%, 98%, 99%, or 100% identical to the amino acid sequence of SEQ ID NO: 19, and the ALK7-Fc fusion protein comprises an Fc domain that is at least 75%, 80%, 85%, 90%, 91%, 92%, 93%, 94%, 95%, 96%, 97%, 98%, 99%, or 100% identical to the amino acid sequence of SEQ ID NO: 18. In some embodiments, the heteromultimer comprises an Fc domain selected from: (a) The variant ActRIIB-Fc fusion protein comprises an Fc domain that is at least 75%, 80%, 85%, 90%, 91%, 92%, 93%, 94%, 95%, 96%, 97%, 98%, 99%, or 100% identical to the amino acid sequence of SEQ ID NO: 20, and the ALK4-Fc fusion protein comprises an Fc domain that is at least 75%, 80%, 85%, 90%, 91%, 92%, 93%, 94%, 95%, 96%, 97%, 98%, 99%, or 100% identical to the amino acid sequence of SEQ ID NO: 21; and (b) The variant ActRIIB-Fc fusion protein comprises an Fc domain that is at least 75%, 80%, 85%, 90%, 91%, 92%, 93%, 94%, 95%, 96%, 97%, 98%, 99%, or 100% identical to the amino acid sequence of SEQ ID NO: 21, and the ALK4-Fc fusion protein comprises an Fc domain that is at least 75%, 80%, 85%, 90%, 91%, 92%, 93%, 94%, 95%, 96%, 97%, 98%, 99%, or 100% identical to the amino acid sequence of SEQ ID NO: 20. In some embodiments, the heteromultimer comprises an Fc domain selected from: (a) The variant ActRIIB-Fc fusion protein comprises an Fc domain that is at least 75%, 80%, 85%, 90%, 91%, 92%, 93%, 94%, 95%, 96%, 97%, 98%, 99%, or 100% identical to the amino acid sequence of SEQ ID NO: 20, and the ALK7-Fc fusion protein comprises an Fc domain that is at least 75%, 80%, 85%, 90%, 91%, 92%, 93%, 94%, 95%, 96%, 97%, 98%, 99%, or 100% identical to the amino acid sequence of SEQ ID NO: 21; and (b) The variant ActRIIB-Fc fusion protein comprises an Fc domain that is at least 75%, 80%, 85%, 90%, 91%, 92%, 93%, 94%, 95%, 96%, 97%, 98%, 99%, or 100% identical to the amino acid sequence of SEQ ID NO: 21, and the ALK7-Fc fusion protein comprises an Fc domain that is at least 75%, 80%, 85%, 90%, 91%, 92%, 93%, 94%, 95%, 96%, 97%, 98%, 99%, or 100% identical to the amino acid sequence of SEQ ID NO: 20. In some embodiments, the heteromultimer comprises an Fc domain selected from: (a) The variant ActRIIB-Fc fusion protein comprises an Fc domain that is at least 75%, 80%, 85%, 90%, 91%, 92%, 93%, 94%, 95%, 96%, 97%, 98%, 99%, or 100% identical to the amino acid sequence of SEQ ID NO: 22, and the ALK4-Fc fusion protein comprises an Fc domain that is at least 75%, 80%, 85%, 90%, 91%, 92%, 93%, 94%, 95%, 96%, 97%, 98%, 99%, or 100% identical to the amino acid sequence of SEQ ID NO: 23; and (b) The variant ActRIIB-Fc fusion protein comprises an Fc domain that is at least 75%, 80%, 85%, 90%, 91%, 92%, 93%, 94%, 95%, 96%, 97%, 98%, 99%, or 100% identical to the amino acid sequence of SEQ ID NO: 23, and the ALK4-Fc fusion protein comprises an Fc domain that is at least 75%, 80%, 85%, 90%, 91%, 92%, 93%, 94%, 95%, 96%, 97%, 98%, 99%, or 100% identical to the amino acid sequence of SEQ ID NO: 22. In some embodiments, the heteromultimer comprises an Fc domain selected from: (a) The variant ActRIIB-Fc fusion protein comprises an Fc domain that is at least 75%, 80%, 85%, 90%, 91%, 92%, 93%, 94%, 95%, 96%, 97%, 98%, 99%, or 100% identical to the amino acid sequence of SEQ ID NO: 22, and the ALK7-Fc fusion protein comprises an Fc domain that is at least 75%, 80%, 85%, 90%, 91%, 92%, 93%, 94%, 95%, 96%, 97%, 98%, 99%, or 100% identical to the amino acid sequence of SEQ ID NO: 23; and (b) The variant ActRIIB-Fc fusion protein comprises an Fc domain that is at least 75%, 80%, 85%, 90%, 91%, 92%, 93%, 94%, 95%, 96%, 97%, 98%, 99%, or 100% identical to the amino acid sequence of SEQ ID NO: 23, and the ALK7-Fc fusion protein comprises an Fc domain that is at least 75%, 80%, 85%, 90%, 91%, 92%, 93%, 94%, 95%, 96%, 97%, 98%, 99%, or 100% identical to the amino acid sequence of SEQ ID NO: 22. In some embodiments, the heteromultimer comprises an Fc domain selected from: (a) The variant ActRIIB-Fc fusion protein comprises an Fc domain that is at least 75%, 80%, 85%, 90%, 91%, 92%, 93%, 94%, 95%, 96%, 97%, 98%, 99%, or 100% identical to the amino acid sequence of SEQ ID NO: 24, and the ALK4-Fc fusion protein comprises an Fc domain that is at least 75%, 80%, 85%, 90%, 91%, 92%, 93%, 94%, 95%, 96%, 97%, 98%, 99%, or 100% identical to the amino acid sequence of SEQ ID NO: 25; and (b) The variant ActRIIB-Fc fusion protein comprises an Fc domain that is at least 75%, 80%, 85%, 90%, 91%, 92%, 93%, 94%, 95%, 96%, 97%, 98%, 99%, or 100% identical to the amino acid sequence of SEQ ID NO: 25, and the ALK4-Fc fusion protein comprises an Fc domain that is at least 75%, 80%, 85%, 90%, 91%, 92%, 93%, 94%, 95%, 96%, 97%, 98%, 99%, or 100% identical to the amino acid sequence of SEQ ID NO: 24. In some embodiments, the heteromultimer comprises an Fc domain selected from: (a) The variant ActRIIB-Fc fusion protein comprises an Fc domain that is at least 75%, 80%, 85%, 90%, 91%, 92%, 93%, 94%, 95%, 96%, 97%, 98%, 99%, or 100% identical to the amino acid sequence of SEQ ID NO: 24, and the ALK7-Fc fusion protein comprises an Fc domain that is at least 75%, 80%, 85%, 90%, 91%, 92%, 93%, 94%, 95%, 96%, 97%, 98%, 99%, or 100% identical to the amino acid sequence of SEQ ID NO: 25; and (b) The variant ActRIIB-Fc fusion protein comprises an Fc domain that is at least 75%, 80%, 85%, 90%, 91%, 92%, 93%, 94%, 95%, 96%, 97%, 98%, 99%, or 100% identical to the amino acid sequence of SEQ ID NO: 25, and the ALK7-Fc fusion protein comprises an Fc domain that is at least 75%, 80%, 85%, 90%, 91%, 92%, 93%, 94%, 95%, 96%, 97%, 98%, 99%, or 100% identical to the amino acid sequence of SEQ ID NO: 24. In some embodiments, the heteromultimer comprises an Fc domain selected from: (a) The variant ActRIIB-Fc fusion protein comprises an Fc domain that is at least 75%, 80%, 85%, 90%, 91%, 92%, 93%, 94%, 95%, 96%, 97%, 98%, 99%, or 100% identical to the amino acid sequence of SEQ ID NO: 26, and the ALK4-Fc fusion protein comprises an Fc domain that is at least 75%, 80%, 85%, 90%, 91%, 92%, 93%, 94%, 95%, 96%, 97%, 98%, 99%, or 100% identical to the amino acid sequence of SEQ ID NO: 27; and (b) The variant ActRIIB-Fc fusion protein comprises an Fc domain that is at least 75%, 80%, 85%, 90%, 91%, 92%, 93%, 94%, 95%, 96%, 97%, 98%, 99%, or 100% identical to the amino acid sequence of SEQ ID NO: 27, and the ALK4-Fc fusion protein comprises an Fc domain that is at least 75%, 80%, 85%, 90%, 91%, 92%, 93%, 94%, 95%, 96%, 97%, 98%, 99%, or 100% identical to the amino acid sequence of SEQ ID NO: 26. In some embodiments, the heteromultimer comprises an Fc domain selected from: (a) The variant ActRIIB-Fc fusion protein comprises an Fc domain that is at least 75%, 80%, 85%, 90%, 91%, 92%, 93%, 94%, 95%, 96%, 97%, 98%, 99%, or 100% identical to the amino acid sequence of SEQ ID NO: 26, and the ALK7-Fc fusion protein comprises an Fc domain that is at least 75%, 80%, 85%, 90%, 91%, 92%, 93%, 94%, 95%, 96%, 97%, 98%, 99%, or 100% identical to the amino acid sequence of SEQ ID NO: 27; and (b) The variant ActRIIB-Fc fusion protein comprises an Fc domain that is at least 75%, 80%, 85%, 90%, 91%, 92%, 93%, 94%, 95%, 96%, 97%, 98%, 99%, or 100% identical to the amino acid sequence of SEQ ID NO: 27, and the ALK7-Fc fusion protein comprises an Fc domain that is at least 75%, 80%, 85%, 90%, 91%, 92%, 93%, 94%, 95%, 96%, 97%, 98%, 99%, or 100% identical to the amino acid sequence of SEQ ID NO: 26. In some embodiments, the variant ActRIIB-Fc fusion protein comprises an Fc domain that is at least 75%, 80%, 85%, 90%, 91%, 92%, 93%, 94%, 95%, 96%, 97%, 98%, 99%, or 100% identical to the amino acid sequence of SEQ ID NO: 28, and the ALK4- Fc fusion protein comprises an Fc domain that is at least 75%, 80%, 85%, 90%, 91%, 92%, 93%, 94%, 95%, 96%, 97%, 98%, 99%, or 100% identical to the amino acid sequence of SEQ ID NO: 29. In some embodiments, the variant ActRIIB-Fc fusion protein comprises an Fc domain that is at least 75%, 80%, 85%, 90%, 91%, 92%, 93%, 94%, 95%, 96%, 97%, 98%, 99%, or 100% identical to the amino acid sequence of SEQ ID NO: 28, and the ALK7-Fc fusion protein comprises an Fc domain that is at least 75%, 80%, 85%, 90%, 91%, 92%, 93%, 94%, 95%, 96%, 97%, 98%, 99%, or 100% identical to the amino acid sequence of SEQ ID NO: 29. In some embodiments, the variant ActRIIB-Fc fusion protein Fc domain comprises a cysteine at amino acid position 132, glutamic acid at amino acid position 138, a tryptophan at amino acid position 144, and a aspartic acid at amino acid position 217, and wherein the ALK4-Fc fusion protein Fc domain comprises a cysteine at amino acid position 127, a serine at amino acid position 144, an alanine at position 146 an arginine at amino acid position 162, an arginine at amino acid position 179, and a valine at amino acid position 185. In some embodiments, the variant ActRIIB-Fc fusion protein Fc domain comprises a cysteine at amino acid position 132, glutamic acid at amino acid position 138, a tryptophan at amino acid position 144, and a aspartic acid at amino acid position 217, and wherein the ALK7-Fc fusion protein Fc domain comprises a cysteine at amino acid position 127, a serine at amino acid position 144, an alanine at position 146 an arginine at amino acid position 162, an arginine at amino acid position 179, and a valine at amino acid position 185. In some embodiments, the ALK4-Fc fusion protein comprises an Fc domain that is at least 75%, 80%, 85%, 90%, 91%, 92%, 93%, 94%, 95%, 96%, 97%, 98%, 99%, or 100% identical to the amino acid sequence of SEQ ID NO: 28, and the variant ActRIIB-Fc fusion protein comprises an Fc domain that is at least 75%, 80%, 85%, 90%, 91%, 92%, 93%, 94%, 95%, 96%, 97%, 98%, 99%, or 100% identical to the amino acid sequence of SEQ ID NO: 29. In some embodiments, the ALK7-Fc fusion protein comprises an Fc domain that is at least 75%, 80%, 85%, 90%, 91%, 92%, 93%, 94%, 95%, 96%, 97%, 98%, 99%, or 100% identical to the amino acid sequence of SEQ ID NO: 28, and the variant ActRIIB-Fc fusion protein comprises an Fc domain that is at least 75%, 80%, 85%, 90%, 91%, 92%, 93%, 94%, 95%, 96%, 97%, 98%, 99%, or 100% identical to the amino acid sequence of SEQ ID NO: 29. In some embodiments, the ALK4-Fc fusion protein Fc domain comprises a cysteine at amino acid position 132, glutamic acid at amino acid position 138, a tryptophan at amino acid position 144, and a aspartic acid at amino acid position 217, and wherein the variant ActRIIB-Fc fusion protein Fc domain comprises a cysteine at amino acid position 127, a serine at amino acid position 144, an alanine at position 146 an arginine at amino acid position 162, an arginine at amino acid position 179, and a valine at amino acid position 185. In some embodiments, the ALK7-Fc fusion protein Fc domain comprises a cysteine at amino acid position 132, glutamic acid at amino acid position 138, a tryptophan at amino acid position 144, and a aspartic acid at amino acid position 217, and wherein the variant ActRIIB-Fc fusion protein Fc domain comprises a cysteine at amino acid position 127, a serine at amino acid position 144, an alanine at position 146 an arginine at amino acid position 162, an arginine at amino acid position 179, and a valine at amino acid position 185. In some embodiments, the variant ActRIIB-Fc fusion protein comprises an Fc domain that is at least 75%, 80%, 85%, 90%, 91%, 92%, 93%, 94%, 95%, 96%, 97%, 98%, 99%, or 100% identical to the amino acid sequence of SEQ ID NO: 30, and the ALK4-Fc fusion protein comprises an Fc domain that is at least 75%, 80%, 85%, 90%, 91%, 92%, 93%, 94%, 95%, 96%, 97%, 98%, 99%, or 100% identical to the amino acid sequence of SEQ ID NO: 23. In some embodiments, the variant ActRIIB-Fc fusion protein comprises an Fc domain that is at least 75%, 80%, 85%, 90%, 91%, 92%, 93%, 94%, 95%, 96%, 97%, 98%, 99%, or 100% identical to the amino acid sequence of SEQ ID NO: 30, and the ALK7-Fc fusion protein comprises an Fc domain that is at least 75%, 80%, 85%, 90%, 91%, 92%, 93%, 94%, 95%, 96%, 97%, 98%, 99%, or 100% identical to the amino acid sequence of SEQ ID NO: 23. In some embodiments, the variant ActRIIB-Fc fusion protein Fc domain comprises a cysteine at amino acid position 132, a tryptophan at amino acid position 144, and a arginine at amino acid position 435, and wherein the ALK4-Fc fusion protein Fc domain comprises cysteine at amino acid position 127, a serine at amino acid position 144, an alanine at amino acid position 146, and a valine at amino acid position 185. In some embodiments, the variant ActRIIB-Fc fusion protein Fc domain comprises a cysteine at amino acid position 132, a tryptophan at amino acid position 144, and a arginine at amino acid position 435, and wherein the ALK7-Fc fusion protein Fc domain comprises cysteine at amino acid position 127, a serine at amino acid position 144, an alanine at amino acid position 146, and a valine at amino acid position 185. In some embodiments, the ALK4-Fc fusion protein comprises an Fc domain that is at least 75%, 80%, 85%, 90%, 91%, 92%, 93%, 94%, 95%, 96%, 97%, 98%, 99%, or 100% identical to the amino acid sequence of SEQ ID NO: 30, and the variant ActRIIB-Fc fusion protein comprises an Fc domain that is at least 75%, 80%, 85%, 90%, 91%, 92%, 93%, 94%, 95%, 96%, 97%, 98%, 99%, or 100% identical to the amino acid sequence of SEQ ID NO: 23. In some embodiments, the ALK7-Fc fusion protein comprises an Fc domain that is at least 75%, 80%, 85%, 90%, 91%, 92%, 93%, 94%, 95%, 96%, 97%, 98%, 99%, or 100% identical to the amino acid sequence of SEQ ID NO: 30, and the variant ActRIIB-Fc fusion protein comprises an Fc domain that is at least 75%, 80%, 85%, 90%, 91%, 92%, 93%, 94%, 95%, 96%, 97%, 98%, 99%, or 100% identical to the amino acid sequence of SEQ ID NO: 23. In some embodiments, the ALK4-Fc fusion protein Fc domain comprises a cysteine at amino acid position 132, a tryptophan at amino acid position 144, and a arginine at amino acid position 435, and wherein the variant ActRIIB-Fc fusion protein Fc domain comprises cysteine at amino acid position 127, a serine at amino acid position 144, an alanine at amino acid position 146, and a valine at amino acid position 185. In some embodiments, the ALK7-Fc fusion protein Fc domain comprises a cysteine at amino acid position 132, a tryptophan at amino acid position 144, and a arginine at amino acid position 435, and wherein the variant ActRIIB-Fc fusion protein Fc domain comprises cysteine at amino acid position 127, a serine at amino acid position 144, an alanine at amino acid position 146, and a valine at amino acid position 185. In some embodiments, the heteromultimer is a heterodimer.

[0038] In certain aspects, the disclosure relates to isolated and/or recombinant nucleic acids comprising a coding sequence for one or more of the ALK4 polypeptide(s) described herein. For example, in some embodiments, the disclosure relates to an isolated and/or recombinant nucleic acid that is at least 75%, 80%, 85%, 90%, 91%, 92%, 93%, 94%, 95%, 96%, 97%, 98%, 99%, or 100% identical to the nucleic acid sequence corresponding to any one of SEQ ID Nos: 221, 222, 223, and 224. In some embodiments, the disclosure relates to isolated and/or recombinant nucleic acids comprising a coding sequence for one or more of the ALK7 polypeptide(s) described herein. For example, in some embodiments, the disclosure relates to an isolated and/or recombinant nucleic acid that is at least 75%, 80%, 85%, 90%, 91%, 92%, 93%, 94%, 95%, 96%, 97%, 98%, 99%, or 100% identical to the nucleic acid sequence corresponding to any one of SEQ ID NOs: 233, 234, 235, 236, 237, 238, 239, 240, and 255. In some embodiments, the disclosure relates to isolated and/or recombinant nucleic acids comprising a coding sequence for one or more of the polypeptide(s) described herein. For example, in some embodiments, the disclosure relates to an isolated and/or recombinant nucleic acid that is at least 75%, 80%, 85%, 90%, 91%, 92%, 93%, 94%, 95%, 96%, 97%, 98%, 99%, or 100% identical to the nucleic acid sequence corresponding to any one of SEQ ID Nos: 3, 10, 32, 35, 38, 41, 44, 47, 277, 331, 334, 337, 340, 343, 346, 349, 352, 355, 367, 370, 373, 376, 379, 382, 385, 388, 391, 394, 397, 400, 403, 406, 409, 412, 415, 418, 421, 424, 427, 430, 433, 436, 439, 442, 445, 448, 451, 454, 457, 460, 463, 466, 469, 472, 475, 478, 481, 484, 487, 490, 493, 496, 499, 502, 505, 508, 511, 514, 517, 521, and 523. In some embodiments, an isolated and/or recombinant polynucleotide sequence of the disclosure comprises a coding sequence for a heteromultimer described herein (e.g., an ActRIIB-Fc:ALK4-Fc heteromultimer or an ActRIIB-Fc:ALK7-Fc heteromultimer). In some embodiments, an isolated and/or recombinant polynucleotide sequence of the disclosure comprises a promoter sequence operably linked to the coding sequence described herein (e.g., a nucleic acid that is at least 75%, 80%, 85%, 90%, 91%, 92%, 93%, 94%, 95%, 96%, 97%, 98%, 99%, or 100% identical to the nucleic acid sequence corresponding to any one of SEQ ID Nos: 3, 10, 32, 35, 38, 41, 44, 47, 277, 331, 334, 337, 340, 343, 346, 349, 352, 355, 367, 370, 373, 376, 379, 382, 385, 388, 391, 394, 397, 400, 403, 406, 409, 412, 415, 418, 421, 424, 427, 430, 433, 436, 439, 442, 445, 448, 451, 454, 457, 460, 463, 466, 469, 472, 475, 478, 481, 484, 487, 490, 493, 496, 499, 502, 505, 508, 511, 514, 517, 521, and 523). In some embodiments, the disclosure relates to a vector comprising an isolated nucleic acid described herein (e.g., a nucleic acid that is at least 75%, 80%, 85%, 90%, 91%, 92%, 93%, 94%, 95%, 96%, 97%, 98%, 99%, or 100% identical to the nucleic acid sequence corresponding to any one of SEQ ID Nos: 3, 10, 32, 35, 38, 41, 44, 47, 277, 331, 334, 337, 340, 343, 346, 349, 352, 355, 367, 370, 373, 376, 379, 382, 385, 388, 391, 394, 397, 400, 403, 406, 409, 412, 415, 418, 421, 424, 427, 430, 433, 436, 439, 442, 445, 448, 451, 454, 457, 460, 463, 466, 469, 472, 475, 478, 481, 484, 487, 490, 493, 496, 499, 502, 505, 508, 511, 514, 517, 521, and 523). In some embodiments, the disclosure relates to a cell comprising a recombinant polynucleotide sequence or a vector described herein.

[0039] In certain aspects, the disclosure relates to methods of making a polypeptide comprising culturing a cell under conditions suitable for expression of a polypeptide, wherein the cell comprises a nucleic acid comprising a coding sequence for the polypeptide described herein. Such a method may include expressing any of the nucleic acids) disclosed herein in a suitable cell (e.g., a CHO cell or COS cell). In some embodiments, the disclosure relates to methods of making a heteromultimer comprising a variant ActRIIB polypeptide and an ALK4 polypeptide comprising culturing a cell under conditions suitable for expression of a variant ActRIIB polypeptide and the ALK4 polypeptide, wherein the cell comprises a first nucleic acid comprising a coding sequence for a variant ActRIIB polypeptide described herein and a second nucleic acid comprising a coding sequence for an ALK4 polypeptide described herein. In some embodiments, the disclosure relates to methods of making a heteromultimer comprising a variant ActRIIB polypeptide and an ALK7 polypeptide comprising culturing a cell under conditions suitable for expression of a variant ActRIIB polypeptide and the ALK7 polypeptide, wherein the cell comprises a first nucleic acid comprising a coding sequence for the variant ActRIIB polypeptide described herein and a second nucleic acid comprising a coding sequence for an ALK7 polypeptide described herein. In some embodiments, the method comprises a further step of recovering the heteromultimer. In some embodiments, the disclosure relates to methods of making a heteromultimer comprising a variant ActRIIB polypeptide and an ALK4 polypeptide comprising: (a) culturing a first cell under conditions suitable for expression of a variant ActRIIB polypeptide, wherein the cell comprises a nucleic acid comprising a coding sequence for a variant ActRIIB polypeptide; (b) recovering the variant ActRIIB polypeptide; (c) culturing a second cell under conditions suitable for expression of an ALK4 polypeptide, wherein the cell comprises a nucleic acid comprising a coding sequence for a ALK4 polypeptide; (d) recovering the ALK4 polypeptide; (e) combining the recovered variant ActRIIB polypeptide and the ALK4 polypeptide under conditions suitable for heteromultimer formation. In some embodiments, the disclosure relates to methods of making a heteromultimer comprising a variant ActRIIB polypeptide and an ALK7 polypeptide comprising: (a) culturing a first cell under conditions suitable for expression of a variant ActRIIB polypeptide, wherein the cell comprises a nucleic acid comprising a coding sequence for a variant ActRIIB polypeptide; (b) recovering the variant ActRIIB polypeptide; (c) culturing a second cell under conditions suitable for expression of an ALK7 polypeptide, wherein the cell comprises a nucleic acid comprising a coding sequence for a ALK7 polypeptide; (d) recovering the ALK7 polypeptide; (e) combining the recovered variant ActRIIB polypeptide and the ALK7 polypeptide under conditions suitable for heteromultimer formation. In some embodiments, the method further comprises recovering the expressed heteromultimer polypeptide.

[0040] In some embodiments, the disclosure relates to methods for increasing red blood cell levels or hemoglobin levels in a patient, comprising administering a patient in need thereof a polypeptide or heteromultimer described herein. In some embodiments, the disclosure relates to methods for treating anemia or a disorder associated with anemia in a patient, comprising administering a patient in need thereof a polypeptide or heteromultimer described herein. In some embodiments, the anemia or disorder associated with anemia is selected from the group consisting of MDS, thalassemia, and myelofibrosis. In some embodiments, the disclosure relates to methods for increasing muscle mass and/or muscle strength in a patient, comprising administering a patient in need thereof a polypeptide or heteromultimer described herein. In some embodiments, the disclosure relates to methods for treating a muscle-related disorder in a patient, comprising administering a patient in need thereof a polypeptide or heteromultimer described herein. In some embodiments, the muscle-related disorder is associated with undesirably low muscle growth and/or muscle weakness. In some embodiments, the muscle-related disorder is selected from the group consisting of Duchenne muscular dystrophy (DMD), Becker muscular dystrophy (BMD), Charcot-Marie-Tooth disease (CMT), facioscapulohumeral muscular dystrophy (FSH or FSHD), Amyotrophic Lateral Sclerosis (ALS), and spinal muscular atrophy (SMA).

[0041] In some embodiments, the disclosure relates to methods for treating pulmonary arterial hypertension in a patient, comprising administering a patient in need thereof a polypeptide or heteromultimer described herein. In some embodiments, the disclosure relates to methods for treating pulmonary hypertension in a patient, comprising administering a patient in need thereof a polypeptide or heteromultimer described herein. In some embodiments, the disclosure relates to methods for treating interstitial lung disease in a patient, comprising administering a patient in need thereof a polypeptide or heteromultimer described herein. In some embodiments, the disclosure relates to methods for treating kidney-associated disease in a patient, comprising administering a patient in need thereof a polypeptide or heteromultimer described herein. In some embodiments, the kidney-associated disease is selected from the group consisting of Alport syndrome, focal segmental glomerulosclerosis, polycystic kidney disease, or chronic kidney disease. In some embodiments, the disclosure relates to methods for treating a bone related disorder in a patient, comprising administering a patient in need thereof a polypeptide or heteromultimer described herein. In some embodiments, the bone related disorder is selected from the group consisting of osteoporosis, hyperparathyroidism, Cushing’s disease, thyrotoxicosis, chronic diarrheal state or malabsorption, renal tubular acidosis, anorexia nervosa, or fibrodysplasia ossificans progressiva (FOP).

[0042] In some embodiments, polypeptides of the present disclosure bind to one or more ligands selected from the group consisting of activin A, activin B, GDF11, GDF8, GDF3, BMP5, BMP6, and BMP10. In some embodiments, polypeptides of the present disclosure bind to activin A, GDF8, GDF11, and BMP10. In some embodiments, polypeptides of the present disclosure inhibit activity of one or more ligands in a cell-based assay.

[0043] In some embodiments, heteromultimer proteins of the present disclosure bind to one or more ligands selected from the group consisting of activin A, activin B, GDF11, GDF8, GDF3, BMP5, BMP6, and BMP10. In some embodiments, heteromultimer proteins of the present disclosure bind to activin A, GDF8, GDF11, and BMP10. In some embodiments, heteromultimer proteins of the present disclosure inhibit activity of one or more ligands in a cell-based assay.

[0044] In certain aspects, the disclosure relates to methods of treating a renal disease or condition comprising administering a polypeptide to a subject in need thereof, wherein the polypeptide comprises an amino acid sequence that is at least 75%, 80%, 85%, 90%, 91%, 92%, 93%, 94%, 95%, 96%, 97%, 98%, 99%, or 100% identical to an amino acid sequence that begins at any one of amino acids 20-29 (e.g., amino acid residues 20, 21, 22, 23, 24, 25, 26, 27, 28, or 29) of SEQ ID NO: 2 and ends at any one of amino acids 109-134 (e.g., amino acid residues 109, 110, 111, 112, 113, 114, 115, 116, 117, 118, 119, 120, 121, 122, 123, 124, 125, 126, 127, 128, 129, 130, 131, 132, 133, or 134) of SEQ ID NO: 2, and wherein the polypeptide comprises one or more amino acid substitutions at a position of SEQ ID NO: 2 selected from the group consisting of: N35, E50, E52, K55, L57, Y60, G68, K74, W78, L79, F82, N83, E94.

[0045] In some embodiments, any of the polypeptides, including heteromultimers thereof, described herein, may be used in accordance with methods of the present disclosure. In some embodiments, the polypeptide comprises an amino acid sequence that is at least 75%, 80%, 85%, 90%, 91%, 92%, 93%, 94%, 95%, 96%, 97%, 98%, 99%, or 100% identical to the amino acid sequence of SEQ ID NO: 31. In some embodiments, the polypeptide comprises an amino acid sequence that is at least 75%, 80%, 85%, 90%, 91%, 92%, 93%, 94%, 95%, 96%, 97%, 98%, 99%, or 100% identical to the amino acid sequence of SEQ ID NO: 33. In some embodiments, the polypeptide comprises an A substitution at the position corresponding to K55 of SEQ ID NO: 2. In some embodiments, the polypeptide comprises an amino acid sequence that is at least 75%, 80%, 85%, 90%, 91%, 92%, 93%, 94%, 95%, 96%, 97%, 98%, 99%, or 100% identical to the amino acid sequence of SEQ ID NO: 34. In some embodiments, the polypeptide comprises an amino acid sequence that is at least 75%, 80%, 85%, 90%, 91%, 92%, 93%, 94%, 95%, 96%, 97%, 98%, 99%, or 100% identical to the amino acid sequence of SEQ ID NO: 36. In some embodiments, the polypeptide comprises an E substitution at the position corresponding to K55 of SEQ ID NO: 2. In some embodiments, the polypeptide comprises an amino acid sequence that is at least 75%, 80%, 85%, 90%, 91%, 92%, 93%, 94%, 95%, 96%, 97%, 98%, 99%, or 100% identical to the amino acid sequence of SEQ ID NO: 40. In some embodiments, the polypeptide comprises an amino acid sequence that is at least 75%, 80%, 85%, 90%, 91%, 92%, 93%, 94%, 95%, 96%, 97%, 98%, 99%, or 100% identical to the amino acid sequence of SEQ ID NO: 42. In some embodiments, the polypeptide comprises a K substitution at the position corresponding to F82 of SEQ ID NO: 2. In some embodiments, the polypeptide comprises an amino acid sequence that is at least 75%, 80%, 85%, 90%, 91%, 92%, 93%, 94%, 95%, 96%, 97%, 98%, 99%, or 100% identical to the amino acid sequence of SEQ ID NO: 37. In some embodiments, the polypeptide comprises an amino acid sequence that is at least 75%, 80%, 85%, 90%, 91%, 92%, 93%, 94%, 95%, 96%, 97%, 98%, 99%, or 100% identical to the amino acid sequence of SEQ ID NO: 39. In some embodiments, the polypeptide comprises an I substitution at the position corresponding to F82 of SEQ ID NO: 2. In some embodiments, the polypeptide comprises an amino acid sequence that is at least 75%, 80%, 85%, 90%, 91%, 92%, 93%, 94%, 95%, 96%, 97%, 98%, 99%, or 100% identical to the amino acid sequence of SEQ ID NO: 43. In some embodiments, the polypeptide comprises an amino acid sequence that is at least 75%, 80%, 85%, 90%, 91%, 92%, 93%, 94%, 95%, 96%, 97%, 98%, 99%, or 100% identical to the amino acid sequence of SEQ ID NO: 45. In some embodiments, the polypeptide comprises an E substitution at the position corresponding to L79 of SEQ ID NO: 2. In some embodiments, the polypeptide comprises a polypeptide of the present disclosure (e.g., an amino acid sequence corresponding to any one of SEQ ID NOs: 366, 368, 369, 371, 372, 374, 375, 377, 378, 380, 381, 383, 384, 386, 387, 389, 390, 392, 393, 395, 396, 398, 399, 401, 402, 404, 405, 407, 408, 410, 411, 413, 414, 416, 417, 419, 420, 422, 423, 425, 426, 428, 429, 431, 432, 434, 435, 437, 438, 440, 441, 443, 444, 446, 447, 449, 450, 452, 453, 455, 456, 458, 459, 461, 462, 464, 465, 467, 468, 470, 471, 473, 474, 476, 477, 479, 480, 482, 483, 485, 486, 488, 489, 491, 492, 494, 495, 497, 498, 500, 501, 503, 504, 506, 507, 509, 510, 512, 513, 515, 522, and 524)

[0046] In some embodiments of the present disclosure, the renal disease or condition is Alport syndrome. In some embodiments of the present disclosure, the renal disease or condition is focal segmental glomerulosclerosis (FSGS). In some embodiments of the present disclosure, the renal disease or condition is polycystic kidney disease. In some embodiments, of the present disclosure the renal disease or condition is autosomal dominant polycystic kidney disease (ADPKD). In some embodiments of the present disclosure, the renal disease or condition is autosomal recessive polycystic kidney disease (ARPKD). In some embodiments of the present disclosure, the renal disease or condition is chronic kidney disease (CKD). In some embodiments, the subject has a decline in kidney function. In some embodiments, the method slows kidney function decline.

[0047] In some embodiments, methods of the present disclosure further comprise administering to the subject an additional active agent and/or supportive therapy for treating a renal disease or condition. In some embodiments, the additional active agent and/or supportive therapy for treating a renal disease or condition is selected from the group consisting of: an angiotensin receptor blocker (ARB) (e.g., losartan, irbesartan, olmesartan, candesartan, valsartan, fimasartan, azilsartan, salprisartan, and telmisartan), an angiotensin-converting enzyme (ACE) inhibitor (e.g., benazepril, captopril, enalapril, lisinopril, perindopril, ramipril, trandolapril, and zofenopril), a glucocorticoid (e.g., beclomethasone, betamethasone, budesonide, cortisone, dexamethasone, hydrocortisone, methylprednisolone, prednisolone, methylprednisone, prednisone, and triamcinolone), a calcineurin inhibitor (e.g., cyclosporine, tacrolimus), cyclophosphamide, chlorambucil, a janus kinase inhibitor (e.g., tofacitinib), an mTOR inhibitor (e.g., sirolimus, everolimus), an IMDH inhibitor (e.g., azathioprine, leflunomide, mycophenolate), a biologic (e.g., abatacept, adalimumab, anakinra, basiliximab, certolizumab, daclizumab, etanercept, fresolimumab, golimumab, infliximab, ixekizumab, natalizumab, rituximab, secukinumab, tocilizumab, ustekinumab, vedolizumab), a statin (e.g., benazepril, valsartan, fluvastatin, pravastatin), bardoxolone methyl, Achtar gel, tolvaptan, abatacept in combination with sparsentan, aliskiren, allopurinol, ANG-3070, atorvastatin, bleselumab, bosutinib, CCX140-B, CXA-10, D6-25-hydroxyvitamin D3, dapagliflozin, dexamethasone in combination with MMF, emodin, FG-3019, FK506, FK-506 and MMF, FT-011, galactose, GC1008, GFB-887, isotretinoin, lademirsen, lanreotide, levamisole, lixivaptan, losmapimod, metformin, mizorbine, N-acetylmannosamine, octreotide, paricalcitol, PF-06730512, pioglitazone, propagermanium, propagermanium and irbesartan, rapamune, rapamycin, RE-021 (e.g., sparsentan), RG012, rosiglitazone (e.g., Avandia), saquinivir, SAR339375, somatostatin, spironolactone, tesevatinib (KD019), tetracosactin, tripterygium wilfordii (TW), valproic acid, VAR-200, venglustat (GZ402671), verinurad, voclosporin, VX-417, kidney dialysis, kidney transplant, mesenchymal stem cell therapy, bone marrow stem cells, lipoprotein removal, a Liposorber LA-15 device, plasmapheresis, plasma exchange, and a change in diet (e.g., dietary sodium intake). In some embodiments, the additional active agent and/or supportive therapy for treating a renal disease or condition is an angiotensin receptor blocker (ARB) selected from the group consisting of losartan, irbesartan, olmesartan, candesartan, valsartan, fimasartan, azilsartan, salprisartan, and telmisartan. In some embodiments, the additional active agent and/or supportive therapy for treating a renal disease or condition is an angiotensin-converting enzyme (ACE) inhibitor selected from the group consisting of benazepril, captopril, enalapril, lisinopril, perindopril, ramipril, trandolapril, and zofenopril. In some embodiments, the additional active agent and/or supportive therapy for treating a renal disease or condition is a combination of an ARB and an ACE inhibitor.

[0048] In some embodiments of the present disclosure, the subject has proteinuria. In some embodiments, the subject has albuminuria. In some embodiments, the subject has moderate albuminuria. In some embodiments, the subject has severe albuminuria. In some embodiments, the method reduces severity, occurrence and/or duration of one or more of albuminuria, proteinuria, microalbuminuria, and macroalbuminuria in a subject in need thereof.

[0049] In some embodiments of the present disclosure, the subject has an albumin-creatinine ratio (ACR) of between about 30 and about 300 mg albumin per 24 hours of urine collection. In some embodiments, the subject has an ACR of between about 30 and about 300 mg albumin/g of creatinine. In some embodiments, the subject has an albumin-creatinine ratio (ACR) of above about 300 mg albumin/24 hours. In some embodiments, the subject has an ACR of above about 300 mg albumin/g of creatinine. In some embodiments, the subject has Stage A1 albuminuria. In some embodiments, the subject has Stage A2 albuminuria. In some embodiments, the subject has Stage A3 albuminuria. In some embodiments of the present disclosure, the method reduces severity, occurrence and/or duration of Stage A1 albuminuria. In some embodiments, the method reduces severity, occurrence and/or duration of Stage A2 albuminuria. In some embodiments, the method reduces severity, occurrence and/or duration of Stage A3 albuminuria. In some embodiments, the method delays or prevents a subject with Stage A1 albuminuria from progressing to Stage A2 albuminuria. In some embodiments, the method delays or prevents a subject with Stage A2 from progressing to Stage A3 albuminuria. In some embodiments, methods of the present disclosure delay and/or prevent worsening of albuminuria stage progression in a subject in need thereof. In some embodiments of the present disclosure, methods of the present disclosure improve albuminuria classification in a subject by one or more stages. In some embodiments, methods of the present disclosure reduce an ACR of the subject. In some embodiments, methods of the present disclosure reduce the subject’s ACR by between about 0.1 and about 100.0 mg albumin/g creatinine (e.g., by between about 0.1 and about 2.5 mg albumin/g , between about 2.5 and about 3.5 mg albumin/g creatinine, between about 3.5 and about 5.0 mg albumin/g creatinine, between about 5.0 and about 7.5 mg albumin/g creatinine, between about 7.5 and about 10.0 mg albumin/g creatinine, between about 10.0 and about 15.0 mg albumin/g creatinine, between about 15.0 and about 20.0 mg albumin/g creatinine, between about 20.0 and about 25.0 mg albumin/g creatinine, between about 30.0 and about 35.0 mg albumin/g creatinine, between about 40.0 and about 45.0 mg albumin/g creatinine, between about 45.0 and about 50.0 mg albumin/g creatinine, between about 50.0 and about 60.0 mg albumin/g creatinine, between about 60.0 and about 70.0 mg albumin/g creatinine, between about 70.0 and about 80.0 mg albumin/g creatinine, between about 80.0 and about 90.0 mg albumin/g creatinine, between about 90.0 and about 100.0 mg albumin/g creatinine). In some embodiments, methods of the present disclosure reduce the subject’s ACR by at least 2.5% (e.g., 5%, 10%, 15%, 20%, 25%, 30%, 40%, 50%, 60%, 70%. 80%, 90%, 95%, or 99%) compared to a baseline measurement.

[0050] In some embodiments, methods of the present disclosure reduce a urinary protein-creatinine ratio (UPCR) of the subject. In some embodiments, methods of the present disclosure reduce the subject’s UPCR between about 0.1 and about 100.0 mg urinary protein/mg creatinine (e.g., by between about 0.1 and about 2.5 mg urinary protein/mg creatinine, between about 2.5 and about 3.5 mg urinary protein/mg creatinine, between about 3.5 and about 5.0 mg urinary protein/mg creatinine, between about 5.0 and about 7.5 mg urinary protein/mg creatinine, between about 7.5 and about 10.0 mg urinary protein/mg creatinine, between about 10.0 and about 15.0 mg urinary protein/mg creatinine, between about 15.0 and about 20.0 mg urinary protein/mg creatinine, between about 20.0 and about 25.0 mg urinary protein/mg creatinine, between about 30.0 and about 35.0 mg urinary protein/mg creatinine, between about 40.0 and about 45.0 mg urinary protein/mg creatinine, between about 45.0 and about 50.0 mg urinary protein/mg creatinine, between about 50.0 and about 60.0 mg urinary protein/mg creatinine, between about 60.0 and about 70.0 mg urinary protein/mg creatinine, between about 70.0 and about 80.0 mg urinary protein/mg creatinine, between about 80.0 and about 90.0 mg urinary protein/mg creatinine, between about 90.0 and about 100.0 mg urinary protein/mg creatinine). In some embodiments, methods of the present disclosure reduce the subject’s UPCR by at least 2.5% (e.g., 5%, 10%, 15%, 20%, 25%, 30%, 40%, 50%, 60%, 70%. 80%, 90%, 95%, or 99%) compared to a baseline measurement.

[0051] In some embodiments, methods of the present disclosure increase the subject’s estimated glomerular filtration rate (eGFR) and/or glomerular filtration rate (GFR). In some embodiments, the eGFR is measured using serum creatinine, age, ethnicity, and gender variables. In some embodiments, the eGFR is measured using one or more of Cockcroft-Gault formula, Modification of Diet in Renal Disease (MDRD) formula, CKD-EPI formula, Mayo quadratic formula, and Schwartz formula. In some embodiments, the eGFR and/or GFR is increased by at least 2.5% (e.g., 5%, 10%, 15%, 20%, 25%, 30%, 40%, 50%, 60%, 70%. 80%, 90%, 95%, or 99%) compared to a baseline measurement. In some embodiments, the GFR is increased by about 1 mL/min/1.73 m² (e.g., 3, 5, 7, 9, 10, 15, 20, 25, 30, 35, 40, 45, 50, 55, 60, 65, 70, 75, 80, 85, 90, 95, or 100 mL/min/1.73 m²) compared to a baseline measurement.

[0052] In some embodiments, the renal disease or condition is evaluated in stages of chronic kidney disease (CKD). In some embodiments, the subject has stage one chronic kidney disease (CKD). In some embodiments, the subject has stage two chronic kidney disease (CKD). In some embodiments, the subject has stage three chronic kidney disease (CKD). In some embodiments, the subject has stage four chronic kidney disease (CKD). In some embodiments, the subject has stage five chronic kidney disease (CKD). In some embodiments, methods of the present disclosure reduce severity, occurrence and/or duration of Stage 1 CKD. In some embodiments, methods of the present disclosure reduce severity, occurrence and/or duration of Stage 2 CKD. In some embodiments, methods of the present disclosure reduce severity, occurrence and/or duration of Stage 3 CKD. In some embodiments, methods of the present disclosure reduce severity, occurrence and/or duration of Stage 3a CKD. In some embodiments, methods of the present disclosure reduce severity, occurrence and/or duration of Stage 3b CKD. In some embodiments, methods of the present disclosure reduce severity, occurrence and/or duration of Stage 4 CKD. In some embodiments, methods of the present disclosure reduce severity, occurrence and/or duration of Stage 5 CKD. In some embodiments, methods of the present disclosure prevent or delay a subject with Stage 1 CKD from progressing to Stage 2 CKD. In some embodiments, methods of the present disclosure prevent or delay a subject with Stage 2 CKD from progressing to Stage 3 CKD. In some embodiments, methods of the present disclosure prevent or delay a subject with Stage 2 CKD from progressing to Stage 3a CKD. In some embodiments, methods of the present disclosure prevent or delay a subject with Stage 3a CKD from progressing to Stage 3b CKD. In some embodiments, methods of the present disclosure prevent or delay a subject with Stage 3 CKD from progressing to Stage 4 CKD. In some embodiments, methods of the present disclosure prevent or delay a subject with Stage 3b CKD from progressing to Stage 4 CKD. In some embodiments, methods of the present disclosure prevent or delay a subject with Stage 4 CKD from progressing to Stage 5 CKD. In some embodiments, methods of the present disclosure delay and/or prevent worsening of CKD stage progression in a subject in need thereof. In some embodiments, methods of the present disclosure improve renal damage CKD classification in a subject by one or more stages. In some embodiments, methods of the present disclosure reduce total kidney volume in a subject. In some embodiments, the total kidney volume is reduced by at least 2.5% (e.g., 5%, 10%, 15%, 20%, 25%, 30%, 40%, 50%, 60%, 70%. 80%, 90%, 95%, or 99%) compared to a baseline measurement. In some embodiments, methods of the present disclosure reduce the subject’s blood urea nitrogen (BUN). In some embodiments, the BUN is reduced by at least 2.5% (e.g., 5%, 10%, 15%, 20%, 25%, 30%, 40%, 50%, 60%, 70%. 80%, 90%, 95%, or 99%) compared to a baseline measurement. In some embodiments, methods of the present disclosure prevent or delay clinical worsening of a renal disease or condition. In some embodiments, methods of the present disclosure reduce risk of hospitalization for one or more complications associated with a renal disease or condition. In some embodiments, the polypeptide is administered by subcutaneous injection. In some embodiments, the heteromultimer protein is administered by subcutaneous injection.

[0053] In certain aspects, the disclosure relates to methods of treating a renal disease or condition comprising administering a polypeptide to a subject in need thereof, wherein the polypeptide comprises an amino acid sequence that is at least 75%, 80%, 85%, 90%, 91%, 92%, 93%, 94%, 95%, 96%, 97%, 98%, 99%, or 100% identical to an amino acid sequence that begins at any one of amino acids 20-29 (e.g., amino acid residues 20, 21, 22, 23, 24, 25, 26, 27, 28, or 29) of SEQ ID NO: 2 and ends at any one of amino acids 109-134 (e.g., amino acid residues 109, 110, 111, 112, 113, 114, 115, 116, 117, 118, 119, 120, 121, 122, 123, 124, 125, 126, 127, 128, 129, 130, 131, 132, 133, or 134) of SEQ ID NO: 2, and wherein the polypeptide comprises a K substitution at the position corresponding to F82 of SEQ ID NO: 2 . In some embodiments, the polypeptide comprises an amino acid sequence that is at least 75%, 80%, 85%, 90%, 91%, 92%, 93%, 94%, 95%, 96%, 97%, 98%, 99%, or 100% identical to amino acids 29-109 of SEQ ID NO: 2. In some embodiments, the polypeptide comprises an amino acid sequence that is at least 75%, 80%, 85%, 90%, 91%, 92%, 93%, 94%, 95%, 96%, 97%, 98%, 99%, or 100% identical to amino acids 25-131 of SEQ ID NO: 2. In some embodiments, the polypeptide comprises an amino acid sequence that is at least 75%, 80%, 85%, 90%, 91%, 92%, 93%, 94%, 95%, 96%, 97%, 98%, 99%, or 100% identical to amino acids 20-134 of SEQ ID NO: 2. In some embodiments, the polypeptide comprises an amino acid sequence that is at least 75%, 80%, 85%, 90%, 91%, 92%, 93%, 94%, 95%, 96%, 97%, 98%, 99%, or 100% identical to the amino acid sequence of SEQ ID NO: 53. In some embodiments, the polypeptide is a fusion protein further comprising a first polypeptide domain and one or more heterologous polypeptide domains. In some embodiments, the polypeptide is an ActRIIB-Fc fusion protein. In some embodiments, the fusion protein further comprises a linker domain positioned between the first polypeptide domain and the one or more heterologous domains or Fc domain. In some embodiments, the linker domain is selected from: TGGG, TGGGG, SGGGG, GGGGS, GGG, GGGG, SGGG, and GGGGS. In some embodiments, the polypeptide comprises an amino acid sequence that is at least 75%, 80%, 85%, 90%, 91%, 92%, 93%, 94%, 95%, 96%, 97%, 98%, 99%, or 100% identical to the amino acid sequence of SEQ ID NO: 5. In some embodiments, the polypeptide comprises an amino acid sequence that is at least 75%, 80%, 85%, 90%, 91%, 92%, 93%, 94%, 95%, 96%, 97%, 98%, 99%, or 100% identical to the amino acid sequence of SEQ ID NO: 12. In some embodiments, the polypeptide comprises an amino acid sequence that is at least 75%, 80%, 85%, 90%, 91%, 92%, 93%, 94%, 95%, 96%, 97%, 98%, 99%, or 100% identical to the amino acid sequence of SEQ ID NO: 40. In some embodiments, the polypeptide comprises an amino acid sequence that is at least 75%, 80%, 85%, 90%, 91%, 92%, 93%, 94%, 95%, 96%, 97%, 98%, 99%, or 100% identical to the amino acid sequence of SEQ ID NO: 42. In some embodiments, the polypeptide binds to one or more ligands selected from the group consisting of activin A, activin B, GDF11, GDF8, GDF3, BMP5, BMP6, and BMP10. In some embodiments, the polypeptide binds to activin A, GDF8, GDF11, and BMP10. In some embodiments, the polypeptide inhibits the activity of one or more ligands in a cell-based assay.

[0054] In some embodiments of the present disclosure, the renal disease or condition is Alport syndrome. In some embodiments of the present disclosure, the renal disease or condition is focal segmental glomerulosclerosis (FSGS). In some embodiments, the subject has a decline in kidney function. In some embodiments, the method slows kidney function decline.

[0055] In some embodiments, methods of the present disclosure further comprise administering to the subject an additional active agent and/or supportive therapy for treating a renal disease or condition. In some embodiments, the additional active agent and/or supportive therapy for treating a renal disease or condition is selected from the group consisting of: an angiotensin receptor blocker (ARB) (e.g., losartan, irbesartan, olmesartan, candesartan, valsartan, fimasartan, azilsartan, salprisartan, and telmisartan), an angiotensin-converting enzyme (ACE) inhibitor (e.g., benazepril, captopril, enalapril, lisinopril, perindopril, ramipril, trandolapril, and zofenopril), a glucocorticoid (e.g., beclomethasone, betamethasone, budesonide, cortisone, dexamethasone, hydrocortisone, methylprednisolone, prednisolone, methylprednisone, prednisone, and triamcinolone), a calcineurin inhibitor (e.g., cyclosporine, tacrolimus), cyclophosphamide, chlorambucil, a janus kinase inhibitor (e.g., tofacitinib), an mTOR inhibitor (e.g., sirolimus, everolimus), an IMDH inhibitor (e.g., azathioprine, leflunomide, mycophenolate), a biologic (e.g., abatacept, adalimumab, anakinra, basiliximab, certolizumab, daclizumab, etanercept, fresolimumab, golimumab, infliximab, ixekizumab, natalizumab, rituximab, secukinumab, tocilizumab, ustekinumab, vedolizumab), a statin (e.g., benazepril, valsartan, fluvastatin, pravastatin), bardoxolone methyl, Achtar gel, tolvaptan, abatacept in combination with sparsentan, aliskiren, allopurinol, ANG-3070. atorvastatin, bleselumab, bosutinib, CCX140-B, CXA-10, D6-25-hydroxyvitamin D3, dapagliflozin, dexamethasone in combination with MMF, emodin, FG-3019, FK506, FK-506 and MMF, FT-011, galactose, GC1008, GFB-887, isotretinoin, lademirsen, lanreotide, levamisole, lixivaptan, losmapimod, metformin, mizorbine, N-acetylmannosamine, octreotide, paricalcitol, PF-06730512, pioglitazone, propagermanium, propagermanium and irbesartan, rapamune, rapamycin, RE-021 (e.g., sparsentan), RG012, rosiglitazone (e.g., Avandia), saquinivir, SAR339375, somatostatin, spironolactone, tesevatinib (KD019), tetracosactin, tripterygium wilfordii (TW), valproic acid, VAR-200. venglustat (GZ402671), verinurad, voclosporin, VX-147, kidney dialysis, kidney transplant, mesenchymal stem cell therapy, bone marrow stem cells, lipoprotein removal, a Liposorber LA-15 device, plasmapheresis, plasma exchange, and a change in diet (e.g., dietary sodium intake). In some embodiments, the additional active agent and/or supportive therapy for treating a renal disease or condition is an angiotensin receptor blocker (ARB) selected from the group consisting of losartan, irbesartan, olmesartan, candesartan, valsartan, fimasartan, azilsartan, salprisartan, and telmisartan. In some embodiments, the additional active agent and/or supportive therapy for treating a renal disease or condition is an angiotensin-converting enzyme (ACE) inhibitor selected from the group consisting of benazepril, captopril, enalapril, lisinopril, perindopril, ramipril, trandolapril, and zofenopril. In some embodiments, the additional active agent and/or supportive therapy for treating a renal disease or condition is a combination of an ARB and an ACE inhibitor.

[0056] In some embodiments of the present disclosure, the subject has proteinuria. In some embodiments of the present disclosure, the subject has albuminuria. In some embodiments, methods of the present disclosure reduce albumin creatinine ratio (ACR) of the subject. In some embodiments, methods of the present disclosure reduce the subject’s ACR by between about 0.1 and about 100.0 mg albumin/g creatinine (e.g., by between about 0.1 and about 2.5 mg albumin/g , between about 2.5 and about 3.5 mg albumin/g creatinine, between about 3.5 and about 5.0 mg albumin/g creatinine, between about 5.0 and about 7.5 mg albumin/g creatinine, between about 7.5 and about 10.0 mg albumin/g creatinine, between about 10.0 and about 15.0 mg albumin/g creatinine, between about 15.0 and about 20.0 mg albumin/g creatinine, between about 20.0 and about 25.0 mg albumin/g creatinine, between about 30.0 and about 35.0 mg albumin/g creatinine, between about 40.0 and about 45.0 mg albumin/g creatinine, between about 45.0 and about 50.0 mg albumin/g creatinine, between about 50.0 and about 60.0 mg albumin/g creatinine, between about 60.0 and about 70.0 mg albumin/g creatinine, between about 70.0 and about 80.0 mg albumin/g creatinine, between about 80.0 and about 90.0 mg albumin/g creatinine, between about 90.0 and about 100.0 mg albumin/g creatinine). In some embodiments, methods of the present disclosure reduce the subject’s ACR by at least 2.5% (e.g., 5%, 10%, 15%, 20%, 25%, 30%, 40%, 50%, 60%, 70%. 80%, 90%, 95%, or 99%) compared to a baseline measurement. In some embodiments, methods of the present disclosure reduce a urinary protein-creatinine ratio (UPCR) of the subject. In some embodiments, methods of the present disclosure reduce the subject’s UPCR between about 0.1 and about 100.0 mg urinary protein/mg creatinine (e.g., by between about 0.1 and about 2.5 mg urinary protein/mg creatinine, between about 2.5 and about 3.5 mg urinary protein/mg creatinine, between about 3.5 and about 5.0 mg urinary protein/mg creatinine, between about 5.0 and about 7.5 mg urinary protein/mg creatinine, between about 7.5 and about 10.0 mg urinary protein/mg creatinine, between about 10.0 and about 15.0 mg urinary protein/mg creatinine, between about 15.0 and about 20.0 mg urinary protein/mg creatinine, between about 20.0 and about 25.0 mg urinary protein/mg creatinine, between about 30.0 and about 35.0 mg urinary protein/mg creatinine, between about 40.0 and about 45.0 mg urinary protein/mg creatinine, between about 45.0 and about 50.0 mg urinary protein/mg creatinine, between about 50.0 and about 60.0 mg urinary protein/mg creatinine, between about 60.0 and about 70.0 mg urinary protein/mg creatinine, between about 70.0 and about 80.0 mg urinary protein/mg creatinine, between about 80.0 and about 90.0 mg urinary protein/mg creatinine, between about 90.0 and about 100.0 mg urinary protein/mg creatinine). In some embodiments, methods of the present disclosure reduce the subject’s UPCR by at least 2.5% (e.g., 5%, 10%, 15%, 20%, 25%, 30%, 40%, 50%, 60%, 70%. 80%, 90%, 95%, or 99%) compared to a baseline measurement. In some embodiments, methods of the present disclosure increase the subject’s estimated glomerular filtration rate (eGFR) and/or glomerular filtration rate (GFR). In some embodiments, the eGFR is measured using serum creatinine, age, ethnicity, and gender variables. In some embodiments, the eGFR is measured using one or more of Cockcroft-Gault formula, Modification of Diet in Renal Disease (MDRD) formula, CKD-EPI formula, Mayo quadratic formula, and Schwartz formula. In some embodiments, the eGFR and/or GFR is increased by at least 2.5% (e.g., 5%, 10%, 15%, 20%, 25%, 30%, 40%, 50%, 60%, 70%. 80%, 90%, 95%, or 99%) compared to a baseline measurement. In some embodiments, the GFR is increased by about 1 mL/min/1.73 m² (e.g., 3, 5, 7, 9, 10, 15, 20, 25, 30, 35, 40, 45, 50, 55, 60, 65, 70, 75, 80, 85, 90, 95, or 100 mL/min/1.73 m²) compared to a baseline measurement.

[0057] In some embodiments of the present disclosure, the renal disease or condition is evaluated in stages of chronic kidney disease (CKD). In some embodiments, methods of the present disclosure prevent or delay a subject with Stage 1 CKD from progressing to Stage 2 CKD. In some embodiments, methods of the present disclosure prevent or delay a subject with Stage 2 CKD from progressing to Stage 3 CKD. In some embodiments, methods of the present disclosure prevent or delay a subject with Stage 2 CKD from progressing to Stage 3a CKD. In some embodiments, methods of the present disclosure prevent or delay a subject with Stage 3a CKD from progressing to Stage 3b CKD. In some embodiments, methods of the present disclosure prevent or delay a subject with Stage 3 CKD from progressing to Stage 4 CKD. In some embodiments, methods of the present disclosure prevent or delay a subject with Stage 3b CKD from progressing to Stage 4 CKD. In some embodiments, methods of the present disclosure prevent or delay a subject with Stage 4 CKD from progressing to Stage 5 CKD.

[0058] In some embodiments, methods of the present disclosure reduce total kidney volume in a subject. In some embodiments, the total kidney volume is reduced by at least 2.5% (e.g., 5%, 10%, 15%, 20%, 25%, 30%, 40%, 50%, 60%, 70%. 80%, 90%, 95%, or 99%) compared to a baseline measurement.

[0059] In some embodiments, methods of the present disclosure reduce the subject’s blood urea nitrogen (BUN). In some embodiments, the BUN is reduced by at least 2.5% (e.g., 5%, 10%, 15%, 20%, 25%, 30%, 40%, 50%, 60%, 70%. 80%, 90%, 95%, or 99%) compared to a baseline measurement.

[0060] In some embodiments, methods of the present disclosure prevent or delay clinical worsening of a renal disease or condition. In some embodiments, methods of the present disclosure reduce risk of hospitalization for one or more complications associated with a renal disease or condition. In some embodiments of the present disclosure, the polypeptide is administered by subcutaneous injection.

### BRIEF DESCRIPTION OF THE DRAWINGS

[0061] FIG. 1A and FIG. 1B show schematic examples of heteromeric protein complexes comprising a variant ActRIIB polypeptide (indicated as “X”) and either an ALK4 polypeptide (indicated as “Y”) or an ALK7 polypeptide (indicated as “Y”). In the illustrated embodiments, the variant ActRIIB polypeptide is part of a fusion polypeptide that comprises a first member of an interaction pair (“Ci”), and either an ALK4 polypeptide or an ALK7 polypeptide is part of a fusion polypeptide that comprises a second member of an interaction pair (“C₂”). Suitable interaction pairs include, for example, heavy chain and/or light chain immunoglobulin interaction pairs, truncations, and variants thereof such as those described herein [e.g., Spiess et al (2015) Molecular Immunology 67(2A): 95-106]. In each fusion polypeptide, a linker may be positioned between the variant ActRIIB polypeptide, ALK4 polypeptide, or ALK7 polypeptide and the corresponding member of the interaction pair. The first and second members of the interaction pair may be unguided, meaning that the members of the pair may associate with each other or self-associate without substantial preference, and they may have the same or different amino acid sequences. See FIG. 1A. Alternatively, the interaction pair may be a guided (asymmetric) pair, meaning that the members of the pair associate preferentially with each other rather than self-associate. See FIG. 1B.

[0062] FIG. 2 shows a multiple sequence alignment of various vertebrate ActRIIB precursor proteins without their intracellular domains (SEQ ID NOs: 358-363), human ActRIIA precursor protein without its intracellular domain (SEQ ID NO: 364), and a consensus ActRII precursor protein (SEQ ID NO: 365). Upper case letters in the consensus sequence indicate positions that are conserved. Lower case letters in the consensus sequence indicate an amino acid residue that is the predominant form, but not universal at that position.

[0063] FIG. 3 shows multiple sequence alignment of Fc domains from human IgG isotypes using Clustal 2.1. Hinge regions are indicated by dotted underline. Double underline indicates examples of positions engineered in IgG1 (SEQ ID NO: 13) Fc to promote asymmetric chain pairing and the corresponding positions with respect to other isotypes IgG4 (SEQ ID NO: 17), IgG2 (SEQ ID NO: 14), and IgG3 (SEQ ID NO: 15).

[0064] FIG. 4 shows the amino acid sequence of human ActRIIB precursor protein (SEQ ID NO: 2); NCBI Reference Sequence NP_001097.2). The signal peptide is underlined, the extracellular domain is in bold (also referred to as SEQ ID NO: 1), and the potential N-linked glycosylation sites are boxed. SEQ ID NO: 2 is used as the wild-type reference sequence for human ActRIIB in this disclosure, and the numbering for the variants described herein are based on the numbering in SEQ ID NO: 2

[0065] FIG. 5 shows the amino acid sequence of a human ActRIIB extracellular domain polypeptide (SEQ ID NO: 1) in which numbering is based on the native human ActRIIB precursor sequence (see SEQ ID NO: 2).

[0066] FIG. 6 shows a nucleic acid sequence encoding human ActRIIB precursor protein. SEQ ID NO: 4 consists of nucleotides 434-1972 of NCBI Reference Sequence NM _001106.4.

[0067] FIG. 7 shows a nucleic acid sequence (SEQ ID NO: 3) encoding a human ActRIIB(20-134) extracellular domain polypeptide.

[0068] FIG. 8A and FIG. 8B show values for ligand binding kinetics of homodimeric Fc-fusion proteins comprising variant or unmodified ActRIIB domains, as determined by surface plasmon resonance at 37° C. Amino acid numbering is based on SEQ ID NO: 2. ND# indicates that the value is not detectable over concentration range tested. Transient* indicates that the value is indeterminate due to transient nature of interaction. Control sample is ActRIIB-G1Fc (SEQ ID NO: 5).

[0069] FIG. 9 shows values for ligand binding kinetics of homodimeric Fc-fusion proteins comprising variant or unmodified ActRIIB domains, as determined by surface plasmon resonance at 37° C. Amino acid numbering is based on SEQ ID NO: 2. ND# indicates that the value is not detectable over concentration range tested. Transient binding* indicates that the value is indeterminate due to transient nature of interaction. Control sample is ActRIIB-G1Fc (SEQ ID NO: 5).

[0070] FIG. 10 shows values for ligand binding kinetics of homodimeric Fc-fusion proteins comprising variant or unmodified ActRIIB domains, as determined by surface plasmon resonance at 25° C. ND# indicates that the value is not detectable over concentration range tested. Amino acid numbering is based on SEQ ID NO: 2.

[0071] FIG. 11 shows therapeutic effect of variant ActRIIB F82K mFc fusion (“ActRIIB (F82K)-mFc”) in a UUO model. Sixteen mice underwent left unilateral ureteral ligation twice at the level of the lower pole of kidney, and after 3 days, they were randomized into two groups: i) “UUO/PBS” (eight mice were injected subcutaneously with vehicle control, phosphate buffered saline (PBS), at days 3, 7, 10, and 14 after surgery) and ii) “UUO/F82K” (eight mice were injected subcutaneously with variant ActRIIB F82K mFc fusion at a dose of 10 mg/kg at days 3, 7, 10, and 14 after surgery). The “CTRL” is the contralateral kidney that did not undergo the unilateral ureteral obstruction procedure. FIGS. 11A-11E show gene expression analysis of fibrotic gene markers (Fibronectin, PAI-I, Col-I, Col-III, a-SMA, respectively), FIGS. 11F-11G show gene expression analysis of inflammatory gene markers (MCP-1, TNFa, respectively), FIG. 11H shows gene expression analysis of a kidney injury marker (NGAL), and FIGS. 11I-11J show gene expression analysis of TGFβ ligands(Tgfb 1 and Activin A, respectively). Relative to “UUO/PBS” treated mice, “UUO/F82K” treated mice demonstrated significantly lower expression of fibrotic and inflammatory genes, reduced upregulation of TGFβ 1 and activin A, and reduced kidney injury gene expression. Statistical significance (p value) is depicted as * p<0.05, **p<0.01, ***p<0.001, and ****p<0.0001 for comparison between “CTRL” and sample “UUO/PBS”. Statistical significance (p value) is depicted as # p<0.05, ##p<0.01, ###p<0.001, and ####p<0.0001 for comparison between “UUO/PBS” and sample “UUO/F82K”. “B.D.L.” means that the measurement value was below the limit of detection, and no statistics were calculated for a value in comparison to a “B.D.L.” value.

[0072] FIG. 12 shows therapeutic effect of variant ActRIIB F82K mFc fusion (“ActRIIB (F82K)-mFc”) in a Col4a3 (-/-) Alport syndrome model. Fourteen Col4a3-/- mice were randomized into two groups: i) “Col4a3-Veh” (eight mice injected subcutaneously with vehicle control, phosphate buffered saline (PBS), twice a week) and ii) “Col4a3-F82K” (six mice injected subcutaneously with variant ActRIIB F82K mFc fusion (“ActRIIB (F82K)-mFc”) at a dose of 10 mg/kg twice a week. “WT” mice, which are non-treated Col4a3+/+ mice, were also analyzed along with the above at day 49 (7 weeks). Relative to Col4a3-Veh mice, treatment of mice with ActRIIB (F82K)-mFc (“Col4a3-F82K”) significantly reduced albuminuria (depicted as an albumin-creatinine ratio (ACR)) by about 38.9% (p<0.05) at 7 weeks, and by about 45.1% (p<0.001) at 9 weeks (FIG. 12A). To evaluate the therapeutic benefits of ActRIIB (F82K)-mFc in the presence of angiotensin-converting enzyme inhibitor (ACEi) in Alport model, ActRIIB (F82K)-mFc was further assessed in Col4a3-/- mice treated with Ramipril. Thirty-one Col4a3-/- mice were fed with Ramipril (10 mg/kg/day) in drinking water throughout the study, and randomized into two groups: i) sixteen mice were injected subcutaneously with vehicle control, phosphate buffered saline (PBS), twice a week (Col4a3-ACEi/Veh″), and ii) fifteen mice were injected subcutaneously with ActRIIB (F82K)-mFc at a dose of 10 mg/kg twice a week (“Col4a3-ACEi/F82K”). “WT” mice, which are non-treated Col4a3+/+ mice, were also analyzed along with the above at day 49 (7 weeks) to measure albumin to creatinine ratio (ACR, FIG. 12B). Albuminuria was significantly increased from 4 weeks to 17 weeks in Col4a3-/- mice treated with Ramipril, but treatment of these mice with ActRIIB (F82K)-mFc significantly reduced albuminuria by 76.7%% (p<0.05) at 12 weeks, 59% (p<0.05) at 15 weeks, and 86% (p<0.001) at 17 weeks respectively in Col4a3-/-mice, which was associated with decreased BUN in Col4a3-/- mice (FIG. 12C). ActRIIB (F82K)-mFc significantly increased life span in Col4a3-/- mice treated with Ramipril (p<0.05), with a median survival time of 141 days in the mice treated with ActRIIB (F82K)-mFc (“Col4a3-ACEi/F82K”) and 119 days in the cohort treated with PBS (“Col4a3-ACEi/Veh”) (FIG. 12D). Statistical significance (p value) is depicted as * p<0.05, **p<0.01, ***p<0.001, and ****p<0.0001.

[0073] FIG. 13 shows therapeutic effect of variants ActRIIB-(K55A)-mFc, ActRIIB (K55E)-mFc, and ActRIIB (F82I)-mFc in a UUO model. Thirty-two mice underwent left unilateral ureteral ligation twice at the level of the lower pole of kidney, and after 3 days, they were randomized into four groups: i) eight mice were injected subcutaneously with vehicle control, phosphate buffered saline (PBS), at day 3, day 7, day 10, and day 14 after surgery (“UUO/PBS”), ii) eight mice were injected subcutaneously with ActRIIB (K55A)-mFc at a dose of 10 mg/kg at day 3, day 7, day 10, and day 14 after surgery, iii) eight mice were injected subcutaneously with ActRIIB (K55E)-mFc at a dose of 10 mg/kg at day 3, day 7, day 10, and day 14 after surgery, and iv) eight mice were injected subcutaneously with ActRIIB (F82I)-mFc at a dose of 10 mg/kg at day 3, day 7, day 10, and day 14 after surgery. The “CTRL” is the contralateral kidney that did not undergo the unilateral ureteral obstruction procedure. FIGS. 13A-13E show gene expression analysis of fibrotic gene markers (Fibronectin, PAI-I, Col-I, Col-III, a-SMA, respectively), FIGS. 13F-13G show gene expression analysis of inflammatory gene markers (MCP-1, TNFa, respectively), FIG. 13H shows gene expression analysis of a kidney injury marker (NGAL), and FIGS. 13I-13J show gene expression analysis of TGFβ ligands(Tgfb1 and Activin A, respectively). Relative to “UUO/PBS” treated mice, treatment of mice with ActRIIB (K55A)-mFc significantly suppressed the expression of fibrotic and inflammatory genes, inhibited the upregulation of TGFβ 1 and Activin A, and reduced kidney injury. Relative to “UUO/PBS” treated mice, treatment of mice with ActRIIB (K55E)-mFc significantly suppressed the expression of PAI-1 and a-SMA, but not Col1a1, Col3a1, and Fibronectin. In addition, treatment of mice with ActRIIB (K55E)-mFc did not significantly suppress inflammatory gene expression, nor reduce kidney injury. Relative to “UUO/PBS” treated mice, treatment of mice with ActRIIB (F82I)-mFc significantly suppressed the expression of PAI-1 and a-SMA, but not Col1a1, Col3a1, and Fibronectin. In addition, treatment of mice with ActRIIB (F82I)-mFc significantly inhibited the upregulation of TGFβ 1 and Activin A, and reduced kidney injury. However, ActRIIB (F82I)-mFc did not significantly suppress inflammatory gene expression. Statistical significance (p value) is depicted as * p<0.05, **p<0.01, ***p<0.001, and ****p<0.0001 for comparison between “CTRL” and sample “UUO/PBS”. Statistical significance (p value) is depicted as # p<0.05, ##p<0.01, ###p<0.001, and ####p<0.0001 for comparison between “UUO/PBS” and samples “UUO/K55A”, “UUO/K55E”, or “UUO/F82I”. “B.D.L.” means that the measurement value was below the limit of detection, and no statistics were calculated for a value in comparison to a “B.D.L.” value.

[0074] FIG. 14 shows activity of variant ActRIIB-Fc proteins from an A204 cell-based assay to screen variant ActRIIB-Fc proteins for inhibitory effects on cell signaling by activin A, activin B, GDF8, GDF11, BMP6, BMP9, and BMP10. Potencies of homodimeric Fc fusion proteins incorporating amino acid substitutions in the human ActRIIB extracellular domain were compared with that of an Fc fusion protein comprising unmodified human ActRIIB extracellular domain (SEQ ID NO: 519). ND means not detectable, a slash (-) means not tested and/or not calculated, and * means the value was extrapolated, wherein the IC50 for the curve that does not plateau is estimated by extending the curve out according to its slope to reach the positive and negative controls within one additional concentration at the highest or lowest concentration.

[0075] FIG. 15A and FIG. 15B show values for ligand binding kinetics of homodimeric Fc-fusion proteins comprising variant or unmodified ActRIIB domains, as determined by surface plasmon resonance at 37° C. Amino acid numbering is based on SEQ ID NO: 2. N.B. means no binding (less than 5 Resonance Units (RU) in signal), M.B. means minimal binding (less than 10 RU in signal), and transient binding indicates that the value is indeterminate due to transient nature of interaction. Control sample is ActRIIB-G1Fc (SEQ ID NO: 519).

[0076] FIG. 16A and FIG. 16B show values for ligand binding kinetics of homodimeric Fc-fusion proteins comprising variant or unmodified ActRIIB domains, as determined by surface plasmon resonance at 37° C. Amino acid numbering is based on SEQ ID NO: 2. N.B. means no binding (less than 5 Resonance Units (RU) in signal), M.B. means minimal binding (less than 10 RU in signal), and transient binding indicates that the value is indeterminate due to transient nature of interaction. Control sample is ActRIIB-G1Fc (SEQ ID NO: 519).

### DETAILED DESCRIPTION

### 1. Overview

[0077] In certain aspects, the present disclosure relates to ActRIIB polypeptides. As used herein, the term “ActRIIB” refers to a family of activin receptor type IIB (ActRIIB) proteins and ActRIIB-related proteins, derived from any species. Members of the ActRIIB family are generally all transmembrane proteins, composed of a ligand-binding extracellular domain with cysteine-rich region, a transmembrane domain, and a cytoplasmic domain with predicted serine/threonine kinase specificity. The amino acid sequence of human ActRIIB precursor protein is shown in FIG. 4 (SEQ ID NO: 2). Examples of variant ActRIIB polypeptides are provided throughout the present disclosure as well as in International Pat. Application Publication Nos. WO 2006/012627, WO 2008/097541, WO 2010/151426, WO 2011/020045, WO 2018/009624, and WO 2018/067874 which are incorporated herein by reference in their entirety.

[0078] The term “ActRIIB polypeptide” is used to refer to polypeptides comprising any naturally occurring polypeptide of an ActRIIB family member as well as any variants thereof (including mutants, fragments, fusions, and peptidomimetic forms) that retain a useful activity. For example, ActRIIB polypeptides include polypeptides derived from the sequence of any known ActRIIB having a sequence at least about 80% identical to the sequence of an ActRIIB polypeptide, and preferably at least 85%, 90%, 91%, 92%, 93%, 94%, 95%, 96%, 97%, 98%, 99% or greater identity.

[0079] In a specific embodiment, the disclosure relates to soluble ActRIIB polypeptides. As described herein, the term “soluble ActRIIB polypeptide” generally refers to polypeptides comprising an extracellular domain of an ActRIIB protein. The term “soluble ActRIIB polypeptide,” as used herein, includes any naturally occurring extracellular domain of an ActRIIB protein as well as any variants thereof (including mutants, fragments and peptidomimetic forms) that retain a useful activity. For example, the extracellular domain of an ActRIIB protein binds to a ligand and is generally soluble. Examples of soluble ActRIIB polypeptides include an ActRIIB extracellular domain (SEQ ID NO: 1) shown in FIG. 5 as well as SEQ ID NO: 53. This truncated ActRIIB extracellular domain (SEQ ID NO: 53) is denoted ActRIIB(25-131) based on numbering in SEQ ID NO: 2. Other examples of soluble ActRIIB polypeptides comprise a signal sequence in addition to the extracellular domain of an ActRIIB protein (see Example 1). The signal sequence can be a native signal sequence of an ActRIIB, or a signal sequence from another protein, such as a tissue plasminogen activator (TPA) signal sequence or a honey bee melatin signal sequence.

[0080] TGF-β signals are mediated by heteromeric complexes of type I and type II serine/ threonine kinase receptors, which phosphorylate and activate downstream Smad proteins upon ligand stimulation (Massague, 2000, Nat. Rev. Mol. Cell Biol. 1:169-178). These type I and type II receptors are all transmembrane proteins, composed of a ligand-binding extracellular domain with cysteine-rich region, a transmembrane domain, and a cytoplasmic domain with predicted serine/threonine specificity. Type I receptors are essential for signaling, and type II receptors are required for binding ligands. Type I and type II activin receptors form a stable complex after ligand binding, resulting in phosphorylation of type I receptors by type II receptors.

[0081] Two related type II receptors, ActRIIA and ActRIIB, have been identified as the type II receptors for activins (Mathews and Vale, 1991, Cell 65:973-982; Attisano et al., 1992, Cell 68: 97-108). Besides activins, ActRIIA and ActRIIB can biochemically interact with several other TGF-β family proteins, including BMP7, Nodal, GDF8, and GDF11 (Yamashita et al., 1995, J. Cell Biol. 130:217-226; Lee and McPherron, 2001, Proc. Natl. Acad. Sci. 98:9306-9311; Yeo and Whitman, 2001, Mol. Cell 7: 949-957; Oh et al., 2002, Genes Dev. 16:2749-54). Applicants have found that soluble ActRIIA-Fc fusion proteins and ActRIIB-Fc fusion proteins have substantially different effects in vivo, with ActRIIA-Fc having primary effects on bone and ActRIIB-Fc having primary effects on skeletal muscle.

[0082] In certain embodiments, the present disclosure relates to antagonizing a ligand of ActRIIB receptors (also referred to as an ActRIIB ligand) with a subject ActRIIB polypeptide (e.g., a variant ActRIIB polypeptide). In some embodiments, the variant ActRIIB polypeptide is a member of a homomultimer (e.g., homodimer). In some embodiments, the variant ActRIIB polypeptide is a member of a heteromultimer (e.g., a heterodimer). In some embodiments, the variant ActRIIB polypeptide heteromultimerizes with any of the other soluble receptors disclosed herein. In some embodiments, the variant ActRIIB polypeptide is fused to any of the proteins disclosed herein (any of the soluble receptors disclosed herein). Thus, compositions and methods of the present disclosure are useful for treating disorders associated with abnormal activity of one or more ligands of ActRIIB receptors. Exemplary ligands of ActRIIB receptors include some TGF-β family members, such as activin A, activin B, GDF3, GDF8, GDF11, BMP6, BMP9 and BMP10. In some embodiments, any of the heteromultimers disclosed herein have a different binding profile as compared to any of the ActRIIB homomultimers (e.g., homodimers) disclosed herein.

[0083] Activins are dimeric polypeptide growth factors and belong to the TGF-beta superfamily. There are three activins (A, B, and AB) that are homo/heterodimers of two closely related β subunits (β_{A}β_{A}, β_{B}β_{B}, and β_{A}β_{B}). In the TGF-beta superfamily, activins are unique and multifunctional factors that can stimulate hormone production in ovarian and placental cells, support neuronal cell survival, influence cell-cycle progress positively or negatively depending on cell type, and induce mesodermal differentiation at least in amphibian embryos (DePaolo et al., 1991, Proc SocEp Biol Med. 198:500-512; Dyson et al., 1997, Curr Biol. 7:81-84; Woodruff, 1998, Biochem Pharmacol. 55:953-963). Moreover, erythroid differentiation factor (EDF) isolated from the stimulated human monocytic leukemic cells was found to be identical to activin A (Murata et al., 1988, PNAS, 85:2434). It was suggested that activin A acts as a natural regulator of erythropoiesis in the bone marrow. In several tissues, activin signaling is antagonized by its related heterodimer, inhibin. For example, during the release of follicle-stimulating hormone (FSH) from the pituitary, activin promotes FSH secretion and synthesis, while inhibin prevents FSH secretion and synthesis. Other proteins that may regulate activin bioactivity and/or bind to activin include follistatin (FS), follistatin-related protein (FSRP), α₂-macroglobulin, Cerberus, and endoglin.

[0084] Growth and differentiation factor-8 (GDF8) is also known as myostatin. GDF8 is a negative regulator of skeletal muscle mass. GDF8 is highly expressed in the developing and adult skeletal muscle. The GDF8 null mutation in transgenic mice is characterized by a marked hypertrophy and hyperplasia of the skeletal muscle (McPherron et al., Nature, 1997, 387:83-90). Similar increases in skeletal muscle mass are evident in naturally occurring mutations of GDF8 in cattle (Ashmore et al., 1974, Growth, 38:501-507; Swatland and Kieffer, J. Anim. Sci., 1994, 38:752-757; McPherron and Lee, Proc. Natl. Acad. Sci. USA, 1997, 94:12457-12461; and Kambadur et al., Genome Res., 1997, 7:910-915) and, strikingly, in humans (Schuelke et al., N Engl J Med 2004;350:2682-8). Studies have also shown that muscle wasting associated with HIV-infection in humans is accompanied by increases in GDF8 protein expression (Gonzalez-Cadavid et al., PNAS, 1998, 95:14938-43). In addition, GDF8 can modulate the production of muscle-specific enzymes (e.g., creatine kinase) and modulate myoblast cell proliferation (WO 00/43781). The GDF8 propeptide can noncovalently bind to the mature GDF8 domain dimer, inactivating its biological activity (Miyazono et al. (1988) J. Biol. Chem., 263: 6407-6415; Wakefield et al. (1988) J. Biol. Chem., 263; 7646-7654; and Brown et al. (1990) Growth Factors, 3: 35-43). Other proteins which bind to GDF8 or structurally related proteins and inhibit their biological activity include follistatin, and potentially, follistatin-related proteins (Gamer et al. (1999) Dev. Biol., 208: 222-232).

[0085] Growth and differentiation factor-11 (GDF11), also known as BMP11, is a secreted protein (McPherron et al., 1999, Nat. Genet. 22: 260-264). GDF11 is expressed in the tail bud, limb bud, maxillary and mandibular arches, and dorsal root ganglia during mouse development (Nakashima et al., 1999, Mech. Dev. 80: 185-189). GDF11 plays a unique role in patterning both mesodermal and neural tissues (Gamer et al., 1999, Dev Biol., 208:222-32). GDF11 was shown to be a negative regulator of chondrogenesis and myogenesis in developing chick limb (Gamer et al., 2001, Dev Biol. 229:407-20). The expression of GDF11 in muscle also suggests its role in regulating muscle growth in a similar way to GDF8. In addition, the expression of GDF11 in brain suggests that GDF11 may also possess activities that relate to the function of the nervous system. Interestingly, GDF11 was found to inhibit neurogenesis in the olfactory epithelium (Wu et al., 2003, Neuron. 37:197-207). Hence, GDF11 may have in vitro and in vivo applications in the treatment of diseases such as muscle diseases and neurodegenerative diseases (e.g., amyotrophic lateral sclerosis and spinal muscular atrophy).

[0086] In certain aspects, the present disclosure relates to the use of certain ActRIIB polypeptides (e.g., soluble ActRIIB polypeptides) to antagonize the signaling of ActRIIB ligands generally, in any process associated with ActRIIB activity. Optionally, ActRIIB polypeptides of the disclosure may antagonize one or more ligands of ActRIIB receptors, such as activin A, activin B, GDF8, GDF11, or BMP10, and may therefore be useful in the treatment of additional disorders. In particular, the disclosure provides variant ActRIIB polypeptides with reduced binding affinity to BMP9 while retaining binding affinity to one or more of activin A, activin B , GDF8, GDF11, and BMP10. Accordingly, these variant ActRIIB polypeptides may be more useful than an unmodified ActRIIB polypeptide in certain applications where such selective antagonism is advantageous. Examples include therapeutic applications where it is desirable to retain antagonisms of one or more of activin A, activin B, GDF8, GDF11, and BMP10, while reducing antagonism of BMP9. In some embodiments, any of the ActRIIB polypeptides disclosed herein may be combined with any of the other polypeptides disclosed herein. In some embodiments, the ActRIIB polypeptide is a member of a heteromultimer (e.g., a heterodimer) with any of the proteins disclosed herein.

[0087] Therefore, the present disclosure contemplates using ActRIIB polypeptides, and variants thereof, in treating or preventing diseases or conditions that are associated with abnormal activity of an ActRIIB or an ActRIIB ligand. ActRIIB ligands are involved in the regulation of many critical biological processes. Due to their key functions in these processes, they may be desirable targets for therapeutic intervention. For example, ActRIIB polypeptides (e.g., variant ActRIIB polypeptides) may be used to treat human or animal disorders or conditions. Example of such disorders or conditions include, but are not limited to, pulmonary disorders (e.g., pulmonary hypertension, interstitial lung disease, idiopathic pulmonary fibrosis), renal diseases or conditions (e.g., Alport syndrome, focal segmental glomerulosclerosis (FSGS), polycystic kidney disease, chronic kidney disease) , peripheral neuropathy, Charcot-Marie-Tooth disease, anemia (e.g., anemia associated with myelodysplastic syndrome, thalassemia or myelofibrosis), metabolic disorders such as type 2 diabetes, impaired glucose tolerance, metabolic syndrome (e.g., syndrome X), and insulin resistance induced by trauma (e.g., burns or nitrogen imbalance); adipose tissue disorders (e.g., obesity); muscle and neuromuscular disorders such as muscular dystrophy (including Duchenne muscular dystrophy); amyotrophic lateral sclerosis (ALS); spinal muscular atrophy (SMA); muscle atrophy; organ atrophy; frailty; carpal tunnel syndrome; congestive obstructive pulmonary disease; and sarcopenia, cachexia and other muscle wasting syndromes. Other examples include osteoporosis, especially in the elderly and/or postmenopausal women; glucocorticoid-induced osteoporosis; osteopenia; osteoarthritis; and osteoporosis-related fractures. Yet further examples include low bone mass due to chronic glucocorticoid therapy, premature gonadal failure, androgen suppression, vitamin D deficiency, secondary hyperparathyroidism, nutritional deficiencies, and anorexia nervosa. These disorders and conditions are discussed below under “Exemplary Therapeutic Uses.”

[0088] The terms used in this specification generally have their ordinary meanings in the art, within the context of this disclosure and in the specific context where each term is used. Certain terms are discussed below or elsewhere in the specification, to provide additional guidance to the practitioner in describing the compositions and methods of the disclosure and how to make and use them. The scope or meaning of any use of a term will be apparent from the specific context in which the term is used.

[0089] “About” and “approximately” shall generally mean an acceptable degree of error for the quantity measured given the nature or precision of the measurements. Typically, exemplary degrees of error are within 20 percent (%), preferably within 10%, and more preferably within 5% of a given value or range of values.

[0090] Alternatively, and particularly in biological systems, the terms “about” and “approximately” may mean values that are within an order of magnitude, preferably within 5-fold and more preferably within 2-fold of a given value. Numerical quantities given herein are approximate unless stated otherwise, meaning that the term “about” or “approximately” can be inferred when not expressly stated.

[0091] The methods of the disclosure may include steps of comparing sequences to each other, including an unmodified (wild-type) sequence to one or more mutants (sequence variants). Such comparisons typically comprise alignments of polymer sequences, e.g., using sequence alignment programs and/or algorithms that are well known in the art (for example, BLAST, FASTA and MEGALIGN, to name a few). The skilled artisan can readily appreciate that, in such alignments, where a mutation contains a residue insertion or deletion, the sequence alignment will introduce a “gap” (typically represented by a dash, or “A”) in the polymer sequence not containing the inserted or deleted residue.

[0092] “Homologous,” in all its grammatical forms and spelling variations, refers to the relationship between two proteins that possess a “common evolutionary origin,” including proteins from superfamilies in the same species of organism, as well as homologous proteins from different species of organism. Such proteins (and their encoding nucleic acids) have sequence homology, as reflected by their sequence similarity, whether in terms of percent identity or by the presence of specific residues or motifs and conserved positions.

[0093] The term “sequence similarity,” in all its grammatical forms, refers to the degree of identity or correspondence between nucleic acid or amino acid sequences that may or may not share a common evolutionary origin.

[0094] However, in common usage and in the instant application, the term “homologous,” when modified with an adverb such as “highly,” may refer to sequence similarity and may or may not relate to a common evolutionary origin.

[0095] “Agonize”, in all its grammatical forms, refers to the process of activating a protein and/or gene (e.g., by activating or amplifying that protein’s gene expression or by inducing an inactive protein to enter an active state) or increasing a protein’s and/or gene’s activity.

[0096] “Antagonize”, in all its grammatical forms, refers to the process of inhibiting a protein and/or gene (e.g., by inhibiting or decreasing that protein’s gene expression or by inducing an active protein to enter an inactive state) or decreasing a protein’s and/or gene’s activity.

[0097] The terms “about” and “approximately” as used in connection with a numerical value throughout the specification and the claims denotes an interval of accuracy, familiar and acceptable to a person skilled in the art. In general, such interval of accuracy is ± 10%, Alternatively, and particularly in biological systems, the terms “about” and “approximately” may mean values that are within an order of magnitude, preferably ≤ 5 -fold and more preferably ≤ 2-fold of a given value.

[0098] Numeric ranges disclosed herein are inclusive of the numbers defining the ranges.

[0099] The terms “a” and “an” include plural referents unless the context in which the term is used clearly dictates otherwise. The terms “a” (or “an”), as well as the terms “one or more,” and “at least one” can be used interchangeably herein. Furthermore, “and/or” where used herein is to be taken as specific disclosure of each of the two or more specified features or components with or without the other. Thus, the term “and/or” as used in a phrase such as “A and/or B” herein is intended to include “A and B,” “A or B,” “A” (alone), and “B” (alone). Likewise, the term “and/or” as used in a phrase such as “A, B, and/or C” is intended to encompass each of the following aspects: A, B, and C; A, B, or C; A or C; A or B; B or C; A and C; A and B; B and C; A (alone); B (alone); and C (alone).

### 2. ActRIIB Polypeptides

[0100] In certain specific embodiments, the present disclosure contemplates making mutations in the extracellular domain (also referred to as ligand-binding domain) of an ActRIIB polypeptide such that the variant (or mutant) ActRIIB polypeptide has altered ligand-binding activities (e.g., binding affinity or binding selectivity). In certain cases, such variant ActRIIB polypeptides have altered (elevated or reduced) binding affinity for a specific ligand. In other cases, the variant ActRIIB polypeptides have altered binding selectivity for their ligands. For example, the disclosure provides a number of variant ActRIIB polypeptides that have reduced binding affinity to BMP9, compared to a non-modified ActRIIB polypeptide, but retain binding affinity for one or more of activin A, activin B, GDF8, GDF11, and BMP10. Optionally, the variant ActRIIB polypeptides have similar or the same biological activities of their corresponding wild-type ActRIIB polypeptides. For example, a variant ActRIIB polypeptide of the disclosure may bind to and inhibit function of an ActRIIB ligand (e.g., activin A, activin B, GDF8, GDF11 or BMP10). In some embodiments, a variant ActRIIB polypeptide of the disclosure treats human or animal disorders or conditions such as pulmonary disorders (e.g., pulmonary hypertension, interstitial lung disease, idiopathic pulmonary fibrosis), renal diseases or conditions (e.g., Alport syndrome, focal segmental glomerulosclerosis (FSGS), polycystic kidney disease, chronic kidney disease), peripheral neuropathy, Charcot-Marie-Tooth disease, and anemia (e.g., anemia associated with myelodysplastic syndrome, thalassemia or myelofibrosis). Examples of ActRIIB polypeptides include human ActRIIB precursor polypeptide (SEQ ID NO: 2), and soluble human ActRIIB polypeptides (e.g., SEQ ID NOs: 1, 5, 6, 12, 276, 278, 279, 332, 333, 335, 336, 338, 339, 341, 342, 344, 345, 347, 348, 350, 351, 353, 354, 356, 357, 366, 368, 369, 371, 372, 374, 375, 377, 378, 380, 381, 383, 384, 386, 387, 389, 390, 392, 393, 395, 396, 398, 399, 401, 402, 404, 405, 407, 408, 410, 411, 413, 414, 416, 417, 419, 420, 422, 423, 425, 426, 428, 429, 431, 432, 434, 435, 437, 438, 440, 441, 443, 444, 446, 447, 449, 450, 452, 453, 455, 456, 458, 459, 461, 462, 464, 465, 467, 468, 470, 471, 473, 474, 476, 477, 479, 480, 482, 483, 485, 486, 488, 489, 491, 492, 494, 495, 497, 498, 500, 501, 503, 504, 506, 507, 509, 510, 512, 513, 515, 516, 518, 519, 520, 522, and 524). In some embodiments, the variant ActRIIB polypeptide is a member of a homomultimer (e.g., homodimer). In some embodiments, the variant ActRIIB polypeptide is a member of a heteromultimer (e.g., a heterodimer). In some embodiments, any of the variant ActRIIB polypeptides may be combined (e.g., heteromultimerized with and/or fused to) with any of proteins disclosed herein.

[0101] ActRIIB is well-conserved across nearly all vertebrates, with large stretches of the extracellular domain conserved completely. See FIG. 2. Many of the ligands that bind to ActRIIB are also highly conserved. Accordingly, comparisons of ActRIIB sequences from various vertebrate organisms provide insights into residues that may be altered. Therefore, an active, human ActRIIB variant may include one or more amino acids at corresponding positions from the sequence of another vertebrate ActRIIB, or may include a residue that is similar to that in the human or other vertebrate sequence.

[0102] The disclosure identifies functionally active portions and variants of ActRIIB. Applicant has previously ascertained that an Fc fusion protein having the sequence disclosed by Hilden et al. (Blood. 1994 Apr 15;83(8):2163-70), which has an alanine at the position corresponding to amino acid 64 of SEQ ID NO: 2 (A64), has a relatively low affinity for activin and GDF11. By contrast, the same Fc fusion protein with an arginine at position 64 (R64) has an affinity for activin and GDF-11 in the low nanomolar to high picomolar range. Therefore, a sequence with an R64 (SEQ ID NO: 2) is used as the wild-type reference sequence for human ActRIIB in this disclosure, and the numbering for the variants described herein are based on the numbering in SEQ ID NO: 2. Additionally, one of skill in the art can make any of the ActRIIB variants described herein in the A64 background.

[0103] A processed extracellular ActRIIB polypeptide sequence is shown in SEQ ID NO: 1 (see, e.g., FIG. 5). In some embodiments, a processed ActRIIB polypeptide may be produced with an “SGR...” sequence at the N-terminus. In some embodiments, a processed ActRIIB polypeptide may be produced with a “GRG...” sequence at the N-terminus. For example, it is expected that some constructs, if expressed with a TPA leader, will lack the N-terminal serine. Accordingly, mature ActRIIB sequences described herein may begin with either an N-terminal serine or an N-terminal glycine (lacking the N-terminal serine).

[0104] Attisano et al. (Cell. 1992 Jan 10;68(1):97-108) showed that a deletion of the proline knot at the C-terminus of the extracellular domain of ActRIIB reduced the affinity of the receptor for activin. Data disclosed in WO2008097541 show that an ActRIIB-Fc fusion protein containing amino acids 20-119 of SEQ ID NO: 2, “ActRIIB(20-119)-Fc” has reduced binding to GDF11 and activin relative to an ActRIIB(20-134)-Fc, which includes the proline knot region and the complete juxtamembrane domain. However, an ActRIIB(20-129)-Fc protein retains similar but somewhat reduced activity relative to the wild type, even though the proline knot region is disrupted. Thus, ActRIIB extracellular domains that stop at amino acid 134, 133, 132, 131, 130 and 129 are all expected to be active, but constructs stopping at 134 or 133 may be most active. Similarly, mutations at any of residues 129-134 are not expected to alter ligand binding affinity by large margins. In support of this, mutations of P129 and P130 do not substantially decrease ligand binding. Therefore, an ActRIIB-Fc fusion protein may end as early as amino acid 109 (the final cysteine), however, forms ending at or between 109 and 119 are expected to have reduced ligand binding. Amino acid 119 is poorly conserved and so is readily altered or truncated. Forms ending at 128 or later retain ligand binding activity. Forms ending at or between 119 and 127 will have an intermediate binding ability. Any of these forms may be desirable to use, depending on the clinical or experimental setting.

[0105] At the N-terminus of ActRIIB, it is expected that a protein beginning at amino acid 29 or before will retain ligand binding activity. Amino acid 29 represents the initial cysteine. An alanine-to-asparagine mutation at position 24 introduces an N-linked glycosylation sequence without substantially affecting ligand binding. This confirms that mutations in the region between the signal cleavage peptide and the cysteine cross-linked region, corresponding to amino acids 20-29, are well tolerated. In particular, constructs beginning at position 20, 21, 22, 23 and 24 will retain activity, and constructs beginning at positions 25, 26, 27, 28 and 29 are also expected to retain activity. Data shown in WO2008097541 demonstrate that, surprisingly, a construct beginning at 22, 23, 24 or 25 will have the most activity.

[0106] Taken together, an active portion of ActRIIB comprises amino acids 29-109 of SEQ ID NO: 2, and constructs may, for example, begin at a residue corresponding to amino acids 20-29 and end at a position corresponding to amino acids 109-134. Other examples include constructs that begin at a position from 20-29 or 21-29 and end at a position from 119-134, 119-133 or 129-134, 129-133. Other examples include constructs that begin at a position from 20-24 (or 21-24, or 22-25) and end at a position from 109-134 (or 109-133), 119-134 (or 119-133) or 129-134 (or 129-133). Variants within these ranges are also contemplated, particularly those having at least 80%, 85%, 90%, 91%, 92%, 93%, 94%, 95%, 96%, 97%, 98%, or 99% identity to the corresponding portion of SEQ ID NO: 1.

[0107] In certain embodiments, a variant ActRIIB polypeptide has an amino acid sequence that is at least 75% identical to an amino acid sequence selected from SEQ ID NOs: 1, 2, and 53. In certain cases, the variant ActRIIB polypeptide has an amino acid sequence at least 80%, 85%, 90%, 91%, 92%, 93%, 94%, 95%, 96%, 97%, 98%, 99%, or 100% identical to an amino acid sequence selected from SEQ ID NOs: 1, 2, and 53. In certain cases, the variant ActRIIB polypeptide has an amino acid sequence at least 80%, 85%, 90%, 91%, 92%, 93%, 94%, 95%, 96%, 97%, 98%, 99%, or 100% identical to SEQ ID NO: 1. In certain cases, the variant ActRIIB polypeptide has an amino acid sequence at least 80%, 85%, 90%, 91%, 92%, 93%, 94%, 95%, 96%, 97%, 98%, 99%, or 100% identical to SEQ ID NO: 2. In certain cases, the variant ActRIIB polypeptide has an amino acid sequence at least 80%, 85%, 90%, 91%, 92%, 93%, 94%, 95%, 96%, 97%, 98%, 99%, or 100% identical to SEQ ID NO: 53.

[0108] In some embodiments, variant ActRIIB polypeptides or variant ActRIIB-Fc fusion polypeptides of the disclosure comprise, consist, or consist essentially of an amino acid sequence that is at least 70%, 75%, 80%, 85%, 86%, 87%, 88%, 89%, 90%, 91%, 92%, 93%, 94%, 95%, 96%, 97%, 98%, 99%, or 100% identical to the amino acid sequence of any one of SEQ ID NOs: 1, 2, 5, 6, 12, 31, 33, 34, 36, 37, 39, 40, 42, 43, 45, 46, 48, 49, 50, 51, 52, 53, 276, 278, 279, 332, 333, 335, 336, 338, 339, 341, 342, 344, 345, 347, 348, 350, 351, 353, 354, 356, 357, 366, 368, 369, 371, 372, 374, 375, 377, 378, 380, 381, 383, 384, 386, 387, 389, 390, 392, 393, 395, 396, 398, 399, 401, 402, 404, 405, 407, 408, 410, 411, 413, 414, 416, 417, 419, 420, 422, 423, 425, 426, 428, 429, 431, 432, 434, 435, 437, 438, 440, 441, 443, 444, 446, 447, 449, 450, 452, 453, 455, 456, 458, 459, 461, 462, 464, 465, 467, 468, 470, 471, 473, 474, 476, 477, 479, 480, 482, 483, 485, 486, 488, 489, 491, 492, 494, 495, 497, 498, 500, 501, 503, 504, 506, 507, 509, 510, 512, 513, 515, 516, 518, 519, 520, 522, and 524. In some embodiments, variant ActRIIB polypeptides or variant ActRIIB-Fc fusion polypeptides of the disclosure comprise, consist, or consist essentially of an amino acid sequence that is at least 70%, 75%, 80%, 85%, 86%, 87%, 88%, 89%, 90%, 91%, 92%, 93%, 94%, 95%, 96%, 97%, 98%, 99%, or 100% identical to the amino acid sequence of SEQ ID NO: 1. In some embodiments, variant ActRIIB polypeptides or variant ActRIIB-Fc fusion polypeptides of the disclosure comprise, consist, or consist essentially of an amino acid sequence that is at least 70%, 75%, 80%, 85%, 86%, 87%, 88%, 89%, 90%, 91%, 92%, 93%, 94%, 95%, 96%, 97%, 98%, 99%, or 100% identical to the amino acid sequence of SEQ ID NO: 2. In some embodiments, variant ActRIIB polypeptides or variant ActRIIB-Fc fusion polypeptides of the disclosure comprise, consist, or consist essentially of an amino acid sequence that is at least 70%, 75%, 80%, 85%, 86%, 87%, 88%, 89%, 90%, 91%, 92%, 93%, 94%, 95%, 96%, 97%, 98%, 99%, or 100% identical to the amino acid sequence of SEQ ID NO: 5. The amino acid sequence of SEQ ID NO: 5 may optionally be provided with the lysine removed from the C-terminus. The G1Fc region may also comprise a mutation to an alanine at position 234 or a mutation to an alanine at position 235, or a combination thereof. In some embodiments, variant ActRIIB polypeptides or variant ActRIIB-Fc fusion polypeptides of the disclosure comprise, consist, or consist essentially of an amino acid sequence that is at least 70%, 75%, 80%, 85%, 86%, 87%, 88%, 89%, 90%, 91%, 92%, 93%, 94%, 95%, 96%, 97%, 98%, 99%, or 100% identical to the amino acid sequence of SEQ ID NO: 6. The amino acid sequence of SEQ ID NO: 6 may optionally be provided with the lysine removed from the C-terminus. The G1Fc region may also comprise a mutation to an alanine at position 234 or a mutation to an alanine at position 235, or a combination thereof. In some embodiments, variant ActRIIB polypeptides or variant ActRIIB-Fc fusion polypeptides of the disclosure comprise, consist, or consist essentially of an amino acid sequence that is at least 70%, 75%, 80%, 85%, 86%, 87%, 88%, 89%, 90%, 91%, 92%, 93%, 94%, 95%, 96%, 97%, 98%, 99%, or 100% identical to the amino acid sequence of SEQ ID NO: 519. The amino acid sequence of SEQ ID NO: 519 may optionally be provided with the lysine removed from the C-terminus. The G1Fc region may also comprise a mutation to an alanine at position 234 or a mutation to an alanine at position 235, or a combination thereof. In some embodiments, variant ActRIIB polypeptides or variant ActRIIB-Fc fusion polypeptides of the disclosure comprise, consist, or consist essentially of an amino acid sequence that is at least 70%, 75%, 80%, 85%, 86%, 87%, 88%, 89%, 90%, 91%, 92%, 93%, 94%, 95%, 96%, 97%, 98%, 99%, or 100% identical to the amino acid sequence of SEQ ID NO: 520. The amino acid sequence of SEQ ID NO: 520 may optionally be provided with the lysine removed from the C-terminus. The G1Fc region may also comprise a mutation to an alanine at position 234 or a mutation to an alanine at position 235, or a combination thereof. In some embodiments, variant ActRIIB polypeptides or variant ActRIIB-Fc fusion polypeptides of the disclosure comprise, consist, or consist essentially of an amino acid sequence that is at least 70%, 75%, 80%, 85%, 86%, 87%, 88%, 89%, 90%, 91%, 92%, 93%, 94%, 95%, 96%, 97%, 98%, 99%, or 100% identical to the amino acid sequence of SEQ ID NO: 12. The amino acid sequence of SEQ ID NO: 12 may optionally be provided with the lysine removed from the C-terminus. The G1Fc region may also comprise a mutation to an alanine at position 234 or a mutation to an alanine at position 235, or a combination thereof. In some embodiments, variant ActRIIB polypeptides or variant ActRIIB-Fc fusion polypeptides of the disclosure comprise, consist, or consist essentially of an amino acid sequence that is at least 70%, 75%, 80%, 85%, 86%, 87%, 88%, 89%, 90%, 91%, 92%, 93%, 94%, 95%, 96%, 97%, 98%, 99%, or 100% identical to the amino acid sequence of SEQ ID NO: 31. The amino acid sequence of SEQ ID NO: 31 may optionally be provided with the lysine removed from the C-terminus. The G1Fc region may also comprise a mutation to an alanine at position 234 or a mutation to an alanine at position 235, or a combination thereof. In some embodiments, variant ActRIIB polypeptides or variant ActRIIB-Fc fusion polypeptides of the disclosure comprise, consist, or consist essentially of an amino acid sequence that is at least 70%, 75%, 80%, 85%, 86%, 87%, 88%, 89%, 90%, 91%, 92%, 93%, 94%, 95%, 96%, 97%, 98%, 99%, or 100% identical to the amino acid sequence of SEQ ID NO: 33. The amino acid sequence of SEQ ID NO: 33 may optionally be provided with the lysine removed from the C-terminus. The G1Fc region may also comprise a mutation to an alanine at position 234 or a mutation to an alanine at position 235, or a combination thereof. In some embodiments, variant ActRIIB polypeptides or variant ActRIIB-Fc fusion polypeptides of the disclosure comprise, consist, or consist essentially of an amino acid sequence that is at least 70%, 75%, 80%, 85%, 86%, 87%, 88%, 89%, 90%, 91%, 92%, 93%, 94%, 95%, 96%, 97%, 98%, 99%, or 100% identical to the amino acid sequence of SEQ ID NO: 34. The amino acid sequence of SEQ ID NO: 34 may optionally be provided with the lysine removed from the C-terminus. The G1Fc region may also comprise a mutation to an alanine at position 234 or a mutation to an alanine at position 235, or a combination thereof. In some embodiments, variant ActRIIB polypeptides or variant ActRIIB-Fc fusion polypeptides of the disclosure comprise, consist, or consist essentially of an amino acid sequence that is at least 70%, 75%, 80%, 85%, 86%, 87%, 88%, 89%, 90%, 91%, 92%, 93%, 94%, 95%, 96%, 97%, 98%, 99%, or 100% identical to the amino acid sequence of SEQ ID NO: 36. The amino acid sequence of SEQ ID NO: 36 may optionally be provided with the lysine removed from the C-terminus. The G1Fc region may also comprise a mutation to an alanine at position 234 or a mutation to an alanine at position 235, or a combination thereof. In some embodiments, variant ActRIIB polypeptides or variant ActRIIB-Fc fusion polypeptides of the disclosure comprise, consist, or consist essentially of an amino acid sequence that is at least 70%, 75%, 80%, 85%, 86%, 87%, 88%, 89%, 90%, 91%, 92%, 93%, 94%, 95%, 96%, 97%, 98%, 99%, or 100% identical to the amino acid sequence of SEQ ID NO: 37. The amino acid sequence of SEQ ID NO: 37 may optionally be provided with the lysine removed from the C-terminus. The G1Fc region may also comprise a mutation to an alanine at position 234 or a mutation to an alanine at position 235, or a combination thereof. In some embodiments, variant ActRIIB polypeptides or variant ActRIIB-Fc fusion polypeptides of the disclosure comprise, consist, or consist essentially of an amino acid sequence that is at least 70%, 75%, 80%, 85%, 86%, 87%, 88%, 89%, 90%, 91%, 92%, 93%, 94%, 95%, 96%, 97%, 98%, 99%, or 100% identical to the amino acid sequence of SEQ ID NO: 39. The amino acid sequence of SEQ ID NO: 39 may optionally be provided with the lysine removed from the C-terminus. The G1Fc region may also comprise a mutation to an alanine at position 234 or a mutation to an alanine at position 235, or a combination thereof. In some embodiments, variant ActRIIB polypeptides or variant ActRIIB-Fc fusion polypeptides of the disclosure comprise, consist, or consist essentially of an amino acid sequence that is at least 70%, 75%, 80%, 85%, 86%, 87%, 88%, 89%, 90%, 91%, 92%, 93%, 94%, 95%, 96%, 97%, 98%, 99%, or 100% identical to the amino acid sequence of SEQ ID NO: 40. The amino acid sequence of SEQ ID NO: 40 may optionally be provided with the lysine removed from the C-terminus. The G1Fc region may also comprise a mutation to an alanine at position 234 or a mutation to an alanine at position 235, or a combination thereof. In some embodiments, variant ActRIIB polypeptides or variant ActRIIB-Fc fusion polypeptides of the disclosure comprise, consist, or consist essentially of an amino acid sequence that is at least 70%, 75%, 80%, 85%, 86%, 87%, 88%, 89%, 90%, 91%, 92%, 93%, 94%, 95%, 96%, 97%, 98%, 99%, or 100% identical to the amino acid sequence of SEQ ID NO: 42. The amino acid sequence of SEQ ID NO: 42 may optionally be provided with the lysine removed from the C-terminus. The G1Fc region may also comprise a mutation to an alanine at position 234 or a mutation to an alanine at position 235, or a combination thereof. In some embodiments, variant ActRIIB polypeptides or variant ActRIIB-Fc fusion polypeptides of the disclosure comprise, consist, or consist essentially of an amino acid sequence that is at least 70%, 75%, 80%, 85%, 86%, 87%, 88%, 89%, 90%, 91%, 92%, 93%, 94%, 95%, 96%, 97%, 98%, 99%, or 100% identical to the amino acid sequence of SEQ ID NO: 43. The amino acid sequence of SEQ ID NO: 43 may optionally be provided with the lysine removed from the C-terminus. The G1Fc region may also comprise a mutation to an alanine at position 234 or a mutation to an alanine at position 235, or a combination thereof. In some embodiments, variant ActRIIB polypeptides or variant ActRIIB-Fc fusion polypeptides of the disclosure comprise, consist, or consist essentially of an amino acid sequence that is at least 70%, 75%, 80%, 85%, 86%, 87%, 88%, 89%, 90%, 91%, 92%, 93%, 94%, 95%, 96%, 97%, 98%, 99%, or 100% identical to the amino acid sequence of SEQ ID NO: 45. The amino acid sequence of SEQ ID NO: 45 may optionally be provided with the lysine removed from the C-terminus. The G1Fc region may also comprise a mutation to an alanine at position 234 or a mutation to an alanine at position 235, or a combination thereof. In some embodiments, variant ActRIIB polypeptides or variant ActRIIB-Fc fusion polypeptides of the disclosure comprise, consist, or consist essentially of an amino acid sequence that is at least 70%, 75%, 80%, 85%, 86%, 87%, 88%, 89%, 90%, 91%, 92%, 93%, 94%, 95%, 96%, 97%, 98%, 99%, or 100% identical to the amino acid sequence of SEQ ID NO: 46. The amino acid sequence of SEQ ID NO: 46 may optionally be provided with the lysine removed from the C-terminus. The G1Fc region may also comprise a mutation to an alanine at position 234 or a mutation to an alanine at position 235, or a combination thereof. In some embodiments, variant ActRIIB polypeptides or variant ActRIIB-Fc fusion polypeptides of the disclosure comprise, consist, or consist essentially of an amino acid sequence that is at least 70%, 75%, 80%, 85%, 86%, 87%, 88%, 89%, 90%, 91%, 92%, 93%, 94%, 95%, 96%, 97%, 98%, 99%, or 100% identical to the amino acid sequence of SEQ ID NO: 48. The amino acid sequence of SEQ ID NO: 48 may optionally be provided with the lysine removed from the C-terminus. The G1Fc region may also comprise a mutation to an alanine at position 234 or a mutation to an alanine at position 235, or a combination thereof. In some embodiments, variant ActRIIB polypeptides or variant ActRIIB-Fc fusion polypeptides of the disclosure comprise, consist, or consist essentially of an amino acid sequence that is at least 70%, 75%, 80%, 85%, 86%, 87%, 88%, 89%, 90%, 91%, 92%, 93%, 94%, 95%, 96%, 97%, 98%, 99%, or 100% identical to the amino acid sequence of SEQ ID NO: 49. The amino acid sequence of SEQ ID NO: 49 may optionally be provided with the lysine removed from the C-terminus. The G1Fc region may also comprise a mutation to an alanine at position 234 or a mutation to an alanine at position 235, or a combination thereof. In some embodiments, variant ActRIIB polypeptides or variant ActRIIB-Fc fusion polypeptides of the disclosure comprise, consist, or consist essentially of an amino acid sequence that is at least 70%, 75%, 80%, 85%, 86%, 87%, 88%, 89%, 90%, 91%, 92%, 93%, 94%, 95%, 96%, 97%, 98%, 99%, or 100% identical to the amino acid sequence of SEQ ID NO: 50. The amino acid sequence of SEQ ID NO: 50 may optionally be provided with the lysine removed from the C-terminus. The G1Fc region may also comprise a mutation to an alanine at position 234 or a mutation to an alanine at position 235, or a combination thereof. In some embodiments, variant ActRIIB polypeptides or variant ActRIIB-Fc fusion polypeptides of the disclosure comprise, consist, or consist essentially of an amino acid sequence that is at least 70%, 75%, 80%, 85%, 86%, 87%, 88%, 89%, 90%, 91%, 92%, 93%, 94%, 95%, 96%, 97%, 98%, 99%, or 100% identical to the amino acid sequence of SEQ ID NO: 51. The amino acid sequence of SEQ ID NO: 51 may optionally be provided with the lysine removed from the C-terminus. The G1Fc region may also comprise a mutation to an alanine at position 234 or a mutation to an alanine at position 235, or a combination thereof. In some embodiments, variant ActRIIB polypeptides or variant ActRIIB-Fc fusion polypeptides of the disclosure comprise, consist, or consist essentially of an amino acid sequence that is at least 70%, 75%, 80%, 85%, 86%, 87%, 88%, 89%, 90%, 91%, 92%, 93%, 94%, 95%, 96%, 97%, 98%, 99%, or 100% identical to the amino acid sequence of SEQ ID NO: 52. The amino acid sequence of SEQ ID NO: 52 may optionally be provided with the lysine removed from the C-terminus. The G1Fc region may also comprise a mutation to an alanine at position 234 or a mutation to an alanine at position 235, or a combination thereof. In some embodiments, variant ActRIIB polypeptides or variant ActRIIB-Fc fusion polypeptides of the disclosure comprise, consist, or consist essentially of an amino acid sequence that is at least 70%, 75%, 80%, 85%, 86%, 87%, 88%, 89%, 90%, 91%, 92%, 93%, 94%, 95%, 96%, 97%, 98%, 99%, or 100% identical to the amino acid sequence of SEQ ID NO: 53. In some embodiments, variant ActRIIB polypeptides or variant ActRIIB-Fc fusion polypeptides of the disclosure comprise, consist, or consist essentially of an amino acid sequence that is at least 70%, 75%, 80%, 85%, 86%, 87%, 88%, 89%, 90%, 91%, 92%, 93%, 94%, 95%, 96%, 97%, 98%, 99%, or 100% identical to the amino acid sequence of SEQ ID NO: 276. The amino acid sequence of SEQ ID NO: 276 may optionally be provided with the lysine removed from the C-terminus. The G1Fc region may also comprise a mutation to an alanine at position 234 or a mutation to an alanine at position 235, or a combination thereof. In some embodiments, variant ActRIIB polypeptides or variant ActRIIB-Fc fusion polypeptides of the disclosure comprise, consist, or consist essentially of an amino acid sequence that is at least 70%, 75%, 80%, 85%, 86%, 87%, 88%, 89%, 90%, 91%, 92%, 93%, 94%, 95%, 96%, 97%, 98%, 99%, or 100% identical to the amino acid sequence of SEQ ID NO: 278. The amino acid sequence of SEQ ID NO: 278 may optionally be provided with the lysine removed from the C-terminus. The G1Fc region may also comprise a mutation to an alanine at position 234 or a mutation to an alanine at position 235, or a combination thereof. In some embodiments, variant ActRIIB polypeptides or variant ActRIIB-Fc fusion polypeptides of the disclosure comprise, consist, or consist essentially of an amino acid sequence that is at least 70%, 75%, 80%, 85%, 86%, 87%, 88%, 89%, 90%, 91%, 92%, 93%, 94%, 95%, 96%, 97%, 98%, 99%, or 100% identical to the amino acid sequence of SEQ ID NO: 279. The amino acid sequence of SEQ ID NO: 279 may optionally be provided with the lysine removed from the C-terminus. The G1Fc region may also comprise a mutation to an alanine at position 234 or a mutation to an alanine at position 235, or a combination thereof. In some embodiments, variant ActRIIB polypeptides or variant ActRIIB-Fc fusion polypeptides of the disclosure comprise, consist, or consist essentially of an amino acid sequence that is at least 70%, 75%, 80%, 85%, 86%, 87%, 88%, 89%, 90%, 91%, 92%, 93%, 94%, 95%, 96%, 97%, 98%, 99%, or 100% identical to the amino acid sequence of SEQ ID NO: 332. The amino acid sequence of SEQ ID NO: 332 may optionally be provided with the lysine removed from the C-terminus. The G1Fc region may also comprise a mutation to an alanine at position 234 or a mutation to an alanine at position 235, or a combination thereof. In some embodiments, variant ActRIIB polypeptides or variant ActRIIB-Fc fusion polypeptides of the disclosure comprise, consist, or consist essentially of an amino acid sequence that is at least 70%, 75%, 80%, 85%, 86%, 87%, 88%, 89%, 90%, 91%, 92%, 93%, 94%, 95%, 96%, 97%, 98%, 99%, or 100% identical to the amino acid sequence of SEQ ID NO: 333. The amino acid sequence of SEQ ID NO: 333 may optionally be provided with the lysine removed from the C-terminus. The G1Fc region may also comprise a mutation to an alanine at position 234 or a mutation to an alanine at position 235, or a combination thereof. In some embodiments, variant ActRIIB polypeptides or variant ActRIIB-Fc fusion polypeptides of the disclosure comprise, consist, or consist essentially of an amino acid sequence that is at least 70%, 75%, 80%, 85%, 86%, 87%, 88%, 89%, 90%, 91%, 92%, 93%, 94%, 95%, 96%, 97%, 98%, 99%, or 100% identical to the amino acid sequence of SEQ ID NO: 335. The amino acid sequence of SEQ ID NO: 335 may optionally be provided with the lysine removed from the C-terminus. The G1Fc region may also comprise a mutation to an alanine at position 234 or a mutation to an alanine at position 235, or a combination thereof. In some embodiments, variant ActRIIB polypeptides or variant ActRIIB-Fc fusion polypeptides of the disclosure comprise, consist, or consist essentially of an amino acid sequence that is at least 70%, 75%, 80%, 85%, 86%, 87%, 88%, 89%, 90%, 91%, 92%, 93%, 94%, 95%, 96%, 97%, 98%, 99%, or 100% identical to the amino acid sequence of SEQ ID NO: 336. The amino acid sequence of SEQ ID NO: 336 may optionally be provided with the lysine removed from the C-terminus. The G1Fc region may also comprise a mutation to an alanine at position 234 or a mutation to an alanine at position 235, or a combination thereof. In some embodiments, variant ActRIIB polypeptides or variant ActRIIB-Fc fusion polypeptides of the disclosure comprise, consist, or consist essentially of an amino acid sequence that is at least 70%, 75%, 80%, 85%, 86%, 87%, 88%, 89%, 90%, 91%, 92%, 93%, 94%, 95%, 96%, 97%, 98%, 99%, or 100% identical to the amino acid sequence of SEQ ID NO: 338. The amino acid sequence of SEQ ID NO: 338 may optionally be provided with the lysine removed from the C-terminus. The G1Fc region may also comprise a mutation to an alanine at position 234 or a mutation to an alanine at position 235, or a combination thereof. In some embodiments, variant ActRIIB polypeptides or variant ActRIIB-Fc fusion polypeptides of the disclosure comprise, consist, or consist essentially of an amino acid sequence that is at least 70%, 75%, 80%, 85%, 86%, 87%, 88%, 89%, 90%, 91%, 92%, 93%, 94%, 95%, 96%, 97%, 98%, 99%, or 100% identical to the amino acid sequence of SEQ ID NO: 339. The amino acid sequence of SEQ ID NO: 339 may optionally be provided with the lysine removed from the C-terminus. The G1Fc region may also comprise a mutation to an alanine at position 234 or a mutation to an alanine at position 235, or a combination thereof. In some embodiments, variant ActRIIB polypeptides or variant ActRIIB-Fc fusion polypeptides of the disclosure comprise, consist, or consist essentially of an amino acid sequence that is at least 70%, 75%, 80%, 85%, 86%, 87%, 88%, 89%, 90%, 91%, 92%, 93%, 94%, 95%, 96%, 97%, 98%, 99%, or 100% identical to the amino acid sequence of SEQ ID NO: 341. The amino acid sequence of SEQ ID NO: 341 may optionally be provided with the lysine removed from the C-terminus. The G1Fc region may also comprise a mutation to an alanine at position 234 or a mutation to an alanine at position 235, or a combination thereof. In some embodiments, variant ActRIIB polypeptides or variant ActRIIB-Fc fusion polypeptides of the disclosure comprise, consist, or consist essentially of an amino acid sequence that is at least 70%, 75%, 80%, 85%, 86%, 87%, 88%, 89%, 90%, 91%, 92%, 93%, 94%, 95%, 96%, 97%, 98%, 99%, or 100% identical to the amino acid sequence of SEQ ID NO: 342. The amino acid sequence of SEQ ID NO: 342 may optionally be provided with the lysine removed from the C-terminus. The G1Fc region may also comprise a mutation to an alanine at position 234 or a mutation to an alanine at position 235, or a combination thereof. In some embodiments, variant ActRIIB polypeptides or variant ActRIIB-Fc fusion polypeptides of the disclosure comprise, consist, or consist essentially of an amino acid sequence that is at least 70%, 75%, 80%, 85%, 86%, 87%, 88%, 89%, 90%, 91%, 92%, 93%, 94%, 95%, 96%, 97%, 98%, 99%, or 100% identical to the amino acid sequence of SEQ ID NO: 344. The amino acid sequence of SEQ ID NO: 344 may optionally be provided with the lysine removed from the C-terminus. The G1Fc region may also comprise a mutation to an alanine at position 234 or a mutation to an alanine at position 235, or a combination thereof. In some embodiments, variant ActRIIB polypeptides or variant ActRIIB-Fc fusion polypeptides of the disclosure comprise, consist, or consist essentially of an amino acid sequence that is at least 70%, 75%, 80%, 85%, 86%, 87%, 88%, 89%, 90%, 91%, 92%, 93%, 94%, 95%, 96%, 97%, 98%, 99%, or 100% identical to the amino acid sequence of SEQ ID NO: 345. The amino acid sequence of SEQ ID NO: 345 may optionally be provided with the lysine removed from the C-terminus. The G1Fc region may also comprise a mutation to an alanine at position 234 or a mutation to an alanine at position 235, or a combination thereof. In some embodiments, variant ActRIIB polypeptides or variant ActRIIB-Fc fusion polypeptides of the disclosure comprise, consist, or consist essentially of an amino acid sequence that is at least 70%, 75%, 80%, 85%, 86%, 87%, 88%, 89%, 90%, 91%, 92%, 93%, 94%, 95%, 96%, 97%, 98%, 99%, or 100% identical to the amino acid sequence of SEQ ID NO: 347. The amino acid sequence of SEQ ID NO: 347 may optionally be provided with the lysine removed from the C-terminus. The G1Fc region may also comprise a mutation to an alanine at position 234 or a mutation to an alanine at position 235, or a combination thereof. In some embodiments, variant ActRIIB polypeptides or variant ActRIIB-Fc fusion polypeptides of the disclosure comprise, consist, or consist essentially of an amino acid sequence that is at least 70%, 75%, 80%, 85%, 86%, 87%, 88%, 89%, 90%, 91%, 92%, 93%, 94%, 95%, 96%, 97%, 98%, 99%, or 100% identical to the amino acid sequence of SEQ ID NO: 348. The amino acid sequence of SEQ ID NO: 348 may optionally be provided with the lysine removed from the C-terminus. The G1Fc region may also comprise a mutation to an alanine at position 234 or a mutation to an alanine at position 235, or a combination thereof. In some embodiments, variant ActRIIB polypeptides or variant ActRIIB-Fc fusion polypeptides of the disclosure comprise, consist, or consist essentially of an amino acid sequence that is at least 70%, 75%, 80%, 85%, 86%, 87%, 88%, 89%, 90%, 91%, 92%, 93%, 94%, 95%, 96%, 97%, 98%, 99%, or 100% identical to the amino acid sequence of SEQ ID NO: 350. The amino acid sequence of SEQ ID NO: 350 may optionally be provided with the lysine removed from the C-terminus. The G1Fc region may also comprise a mutation to an alanine at position 234 or a mutation to an alanine at position 235, or a combination thereof. In some embodiments, variant ActRIIB polypeptides or variant ActRIIB-Fc fusion polypeptides of the disclosure comprise, consist, or consist essentially of an amino acid sequence that is at least 70%, 75%, 80%, 85%, 86%, 87%, 88%, 89%, 90%, 91%, 92%, 93%, 94%, 95%, 96%, 97%, 98%, 99%, or 100% identical to the amino acid sequence of SEQ ID NO: 351. The amino acid sequence of SEQ ID NO: 351 may optionally be provided with the lysine removed from the C-terminus. The G1Fc region may also comprise a mutation to an alanine at position 234 or a mutation to an alanine at position 235, or a combination thereof. In some embodiments, variant ActRIIB polypeptides or variant ActRIIB-Fc fusion polypeptides of the disclosure comprise, consist, or consist essentially of an amino acid sequence that is at least 70%, 75%, 80%, 85%, 86%, 87%, 88%, 89%, 90%, 91%, 92%, 93%, 94%, 95%, 96%, 97%, 98%, 99%, or 100% identical to the amino acid sequence of SEQ ID NO: 353. The amino acid sequence of SEQ ID NO: 353 may optionally be provided with the lysine removed from the C-terminus. The G1Fc region may also comprise a mutation to an alanine at position 234 or a mutation to an alanine at position 235, or a combination thereof. In some embodiments, variant ActRIIB polypeptides or variant ActRIIB-Fc fusion polypeptides of the disclosure comprise, consist, or consist essentially of an amino acid sequence that is at least 70%, 75%, 80%, 85%, 86%, 87%, 88%, 89%, 90%, 91%, 92%, 93%, 94%, 95%, 96%, 97%, 98%, 99%, or 100% identical to the amino acid sequence of SEQ ID NO: 354. The amino acid sequence of SEQ ID NO: 354 may optionally be provided with the lysine removed from the C-terminus. The G1Fc region may also comprise a mutation to an alanine at position 234 or a mutation to an alanine at position 235, or a combination thereof. In some embodiments, variant ActRIIB polypeptides or variant ActRIIB-Fc fusion polypeptides of the disclosure comprise, consist, or consist essentially of an amino acid sequence that is at least 70%, 75%, 80%, 85%, 86%, 87%, 88%, 89%, 90%, 91%, 92%, 93%, 94%, 95%, 96%, 97%, 98%, 99%, or 100% identical to the amino acid sequence of SEQ ID NO: 356. The amino acid sequence of SEQ ID NO: 356 may optionally be provided with the lysine removed from the C-terminus. The G1Fc region may also comprise a mutation to an alanine at position 234 or a mutation to an alanine at position 235, or a combination thereof. In some embodiments, variant ActRIIB polypeptides or variant ActRIIB-Fc fusion polypeptides of the disclosure comprise, consist, or consist essentially of an amino acid sequence that is at least 70%, 75%, 80%, 85%, 86%, 87%, 88%, 89%, 90%, 91%, 92%, 93%, 94%, 95%, 96%, 97%, 98%, 99%, or 100% identical to the amino acid sequence of SEQ ID NO: 357. In some embodiments, variant ActRIIB polypeptides or variant ActRIIB-Fc fusion polypeptides of the disclosure comprise, consist, or consist essentially of an amino acid sequence that is at least 70%, 75%, 80%, 85%, 86%, 87%, 88%, 89%, 90%, 91%, 92%, 93%, 94%, 95%, 96%, 97%, 98%, 99%, or 100% identical to the amino acid sequence of SEQ ID NO: 366. The amino acid sequence of SEQ ID NO: 366 may optionally be provided with the lysine removed from the C-terminus. The G1Fc region may also comprise a mutation to an alanine at position 234 or a mutation to an alanine at position 235, or a combination thereof. In some embodiments, variant ActRIIB polypeptides or variant ActRIIB-Fc fusion polypeptides of the disclosure comprise, consist, or consist essentially of an amino acid sequence that is at least 70%, 75%, 80%, 85%, 86%, 87%, 88%, 89%, 90%, 91%, 92%, 93%, 94%, 95%, 96%, 97%, 98%, 99%, or 100% identical to the amino acid sequence of SEQ ID NO: 368. The amino acid sequence of SEQ ID NO: 368 may optionally be provided with the lysine removed from the C-terminus. The G1Fc region may also comprise a mutation to an alanine at position 234 or a mutation to an alanine at position 235, or a combination thereof. In some embodiments, variant ActRIIB polypeptides or variant ActRIIB-Fc fusion polypeptides of the disclosure comprise, consist, or consist essentially of an amino acid sequence that is at least 70%, 75%, 80%, 85%, 86%, 87%, 88%, 89%, 90%, 91%, 92%, 93%, 94%, 95%, 96%, 97%, 98%, 99%, or 100% identical to the amino acid sequence of SEQ ID NO: 369. The amino acid sequence of SEQ ID NO: 369 may optionally be provided with the lysine removed from the C-terminus. The G1Fc region may also comprise a mutation to an alanine at position 234 or a mutation to an alanine at position 235, or a combination thereof. In some embodiments, variant ActRIIB polypeptides or variant ActRIIB-Fc fusion polypeptides of the disclosure comprise, consist, or consist essentially of an amino acid sequence that is at least 70%, 75%, 80%, 85%, 86%, 87%, 88%, 89%, 90%, 91%, 92%, 93%, 94%, 95%, 96%, 97%, 98%, 99%, or 100% identical to the amino acid sequence of SEQ ID NO: 371. The amino acid sequence of SEQ ID NO: 371 may optionally be provided with the lysine removed from the C-terminus. The G1Fc region may also comprise a mutation to an alanine at position 234 or a mutation to an alanine at position 235, or a combination thereof. In some embodiments, variant ActRIIB polypeptides or variant ActRIIB-Fc fusion polypeptides of the disclosure comprise, consist, or consist essentially of an amino acid sequence that is at least 70%, 75%, 80%, 85%, 86%, 87%, 88%, 89%, 90%, 91%, 92%, 93%, 94%, 95%, 96%, 97%, 98%, 99%, or 100% identical to the amino acid sequence of SEQ ID NO: 372. The amino acid sequence of SEQ ID NO: 372 may optionally be provided with the lysine removed from the C-terminus. The G1Fc region may also comprise a mutation to an alanine at position 234 or a mutation to an alanine at position 235, or a combination thereof. In some embodiments, variant ActRIIB polypeptides or variant ActRIIB-Fc fusion polypeptides of the disclosure comprise, consist, or consist essentially of an amino acid sequence that is at least 70%, 75%, 80%, 85%, 86%, 87%, 88%, 89%, 90%, 91%, 92%, 93%, 94%, 95%, 96%, 97%, 98%, 99%, or 100% identical to the amino acid sequence of SEQ ID NO: 374. The amino acid sequence of SEQ ID NO: 374 may optionally be provided with the lysine removed from the C-terminus. The G1Fc region may also comprise a mutation to an alanine at position 234 or a mutation to an alanine at position 235, or a combination thereof. In some embodiments, variant ActRIIB polypeptides or variant ActRIIB-Fc fusion polypeptides of the disclosure comprise, consist, or consist essentially of an amino acid sequence that is at least 70%, 75%, 80%, 85%, 86%, 87%, 88%, 89%, 90%, 91%, 92%, 93%, 94%, 95%, 96%, 97%, 98%, 99%, or 100% identical to the amino acid sequence of SEQ ID NO: 375. The amino acid sequence of SEQ ID NO: 375 may optionally be provided with the lysine removed from the C-terminus. The G1Fc region may also comprise a mutation to an alanine at position 234 or a mutation to an alanine at position 235, or a combination thereof. In some embodiments, variant ActRIIB polypeptides or variant ActRIIB-Fc fusion polypeptides of the disclosure comprise, consist, or consist essentially of an amino acid sequence that is at least 70%, 75%, 80%, 85%, 86%, 87%, 88%, 89%, 90%, 91%, 92%, 93%, 94%, 95%, 96%, 97%, 98%, 99%, or 100% identical to the amino acid sequence of SEQ ID NO: 377. The amino acid sequence of SEQ ID NO: 377 may optionally be provided with the lysine removed from the C-terminus. The G1Fc region may also comprise a mutation to an alanine at position 234 or a mutation to an alanine at position 235, or a combination thereof. In some embodiments, variant ActRIIB polypeptides or variant ActRIIB-Fc fusion polypeptides of the disclosure comprise, consist, or consist essentially of an amino acid sequence that is at least 70%, 75%, 80%, 85%, 86%, 87%, 88%, 89%, 90%, 91%, 92%, 93%, 94%, 95%, 96%, 97%, 98%, 99%, or 100% identical to the amino acid sequence of SEQ ID NO: 378. The amino acid sequence of SEQ ID NO: 378 may optionally be provided with the lysine removed from the C-terminus. The G1Fc region may also comprise a mutation to an alanine at position 234 or a mutation to an alanine at position 235, or a combination thereof. In some embodiments, variant ActRIIB polypeptides or variant ActRIIB-Fc fusion polypeptides of the disclosure comprise, consist, or consist essentially of an amino acid sequence that is at least 70%, 75%, 80%, 85%, 86%, 87%, 88%, 89%, 90%, 91%, 92%, 93%, 94%, 95%, 96%, 97%, 98%, 99%, or 100% identical to the amino acid sequence of SEQ ID NO: 380. The amino acid sequence of SEQ ID NO: 380 may optionally be provided with the lysine removed from the C-terminus. The G1Fc region may also comprise a mutation to an alanine at position 234 or a mutation to an alanine at position 235, or a combination thereof. In some embodiments, variant ActRIIB polypeptides or variant ActRIIB-Fc fusion polypeptides of the disclosure comprise, consist, or consist essentially of an amino acid sequence that is at least 70%, 75%, 80%, 85%, 86%, 87%, 88%, 89%, 90%, 91%, 92%, 93%, 94%, 95%, 96%, 97%, 98%, 99%, or 100% identical to the amino acid sequence of SEQ ID NO: 381. The amino acid sequence of SEQ ID NO: 381 may optionally be provided with the lysine removed from the C-terminus. The G1Fc region may also comprise a mutation to an alanine at position 234 or a mutation to an alanine at position 235, or a combination thereof. In some embodiments, variant ActRIIB polypeptides or variant ActRIIB-Fc fusion polypeptides of the disclosure comprise, consist, or consist essentially of an amino acid sequence that is at least 70%, 75%, 80%, 85%, 86%, 87%, 88%, 89%, 90%, 91%, 92%, 93%, 94%, 95%, 96%, 97%, 98%, 99%, or 100% identical to the amino acid sequence of SEQ ID NO: 383. The amino acid sequence of SEQ ID NO: 383 may optionally be provided with the lysine removed from the C-terminus. The G1Fc region may also comprise a mutation to an alanine at position 234 or a mutation to an alanine at position 235, or a combination thereof. In some embodiments, variant ActRIIB polypeptides or variant ActRIIB-Fc fusion polypeptides of the disclosure comprise, consist, or consist essentially of an amino acid sequence that is at least 70%, 75%, 80%, 85%, 86%, 87%, 88%, 89%, 90%, 91%, 92%, 93%, 94%, 95%, 96%, 97%, 98%, 99%, or 100% identical to the amino acid sequence of SEQ ID NO: 384. The amino acid sequence of SEQ ID NO: 384 may optionally be provided with the lysine removed from the C-terminus. The G1Fc region may also comprise a mutation to an alanine at position 234 or a mutation to an alanine at position 235, or a combination thereof. In some embodiments, variant ActRIIB polypeptides or variant ActRIIB-Fc fusion polypeptides of the disclosure comprise, consist, or consist essentially of an amino acid sequence that is at least 70%, 75%, 80%, 85%, 86%, 87%, 88%, 89%, 90%, 91%, 92%, 93%, 94%, 95%, 96%, 97%, 98%, 99%, or 100% identical to the amino acid sequence of SEQ ID NO: 386. The amino acid sequence of SEQ ID NO: 386 may optionally be provided with the lysine removed from the C-terminus. The G1Fc region may also comprise a mutation to an alanine at position 234 or a mutation to an alanine at position 235, or a combination thereof. In some embodiments, variant ActRIIB polypeptides or variant ActRIIB-Fc fusion polypeptides of the disclosure comprise, consist, or consist essentially of an amino acid sequence that is at least 70%, 75%, 80%, 85%, 86%, 87%, 88%, 89%, 90%, 91%, 92%, 93%, 94%, 95%, 96%, 97%, 98%, 99%, or 100% identical to the amino acid sequence of SEQ ID NO: 387. The amino acid sequence of SEQ ID NO: 387 may optionally be provided with the lysine removed from the C-terminus. The G1Fc region may also comprise a mutation to an alanine at position 234 or a mutation to an alanine at position 235, or a combination thereof. In some embodiments, variant ActRIIB polypeptides or variant ActRIIB-Fc fusion polypeptides of the disclosure comprise, consist, or consist essentially of an amino acid sequence that is at least 70%, 75%, 80%, 85%, 86%, 87%, 88%, 89%, 90%, 91%, 92%, 93%, 94%, 95%, 96%, 97%, 98%, 99%, or 100% identical to the amino acid sequence of SEQ ID NO: 389. The amino acid sequence of SEQ ID NO: 389 may optionally be provided with the lysine removed from the C-terminus. The G1Fc region may also comprise a mutation to an alanine at position 234 or a mutation to an alanine at position 235, or a combination thereof. In some embodiments, variant ActRIIB polypeptides or variant ActRIIB-Fc fusion polypeptides of the disclosure comprise, consist, or consist essentially of an amino acid sequence that is at least 70%, 75%, 80%, 85%, 86%, 87%, 88%, 89%, 90%, 91%, 92%, 93%, 94%, 95%, 96%, 97%, 98%, 99%, or 100% identical to the amino acid sequence of SEQ ID NO: 390. The amino acid sequence of SEQ ID NO: 390 may optionally be provided with the lysine removed from the C-terminus. The G1Fc region may also comprise a mutation to an alanine at position 234 or a mutation to an alanine at position 235, or a combination thereof. In some embodiments, variant ActRIIB polypeptides or variant ActRIIB-Fc fusion polypeptides of the disclosure comprise, consist, or consist essentially of an amino acid sequence that is at least 70%, 75%, 80%, 85%, 86%, 87%, 88%, 89%, 90%, 91%, 92%, 93%, 94%, 95%, 96%, 97%, 98%, 99%, or 100% identical to the amino acid sequence of SEQ ID NO: 392. The amino acid sequence of SEQ ID NO: 392 may optionally be provided with the lysine removed from the C-terminus. The G1Fc region may also comprise a mutation to an alanine at position 234 or a mutation to an alanine at position 235, or a combination thereof. In some embodiments, variant ActRIIB polypeptides or variant ActRIIB-Fc fusion polypeptides of the disclosure comprise, consist, or consist essentially of an amino acid sequence that is at least 70%, 75%, 80%, 85%, 86%, 87%, 88%, 89%, 90%, 91%, 92%, 93%, 94%, 95%, 96%, 97%, 98%, 99%, or 100% identical to the amino acid sequence of SEQ ID NO: 393. The amino acid sequence of SEQ ID NO: 393 may optionally be provided with the lysine removed from the C-terminus. The G1Fc region may also comprise a mutation to an alanine at position 234 or a mutation to an alanine at position 235, or a combination thereof. In some embodiments, variant ActRIIB polypeptides or variant ActRIIB-Fc fusion polypeptides of the disclosure comprise, consist, or consist essentially of an amino acid sequence that is at least 70%, 75%, 80%, 85%, 86%, 87%, 88%, 89%, 90%, 91%, 92%, 93%, 94%, 95%, 96%, 97%, 98%, 99%, or 100% identical to the amino acid sequence of SEQ ID NO: 395. The amino acid sequence of SEQ ID NO: 395 may optionally be provided with the lysine removed from the C-terminus. The G1Fc region may also comprise a mutation to an alanine at position 234 or a mutation to an alanine at position 235, or a combination thereof. In some embodiments, variant ActRIIB polypeptides or variant ActRIIB-Fc fusion polypeptides of the disclosure comprise, consist, or consist essentially of an amino acid sequence that is at least 70%, 75%, 80%, 85%, 86%, 87%, 88%, 89%, 90%, 91%, 92%, 93%, 94%, 95%, 96%, 97%, 98%, 99%, or 100% identical to the amino acid sequence of SEQ ID NO: 396. The amino acid sequence of SEQ ID NO: 396 may optionally be provided with the lysine removed from the C-terminus. The G1Fc region may also comprise a mutation to an alanine at position 234 or a mutation to an alanine at position 235, or a combination thereof. In some embodiments, variant ActRIIB polypeptides or variant ActRIIB-Fc fusion polypeptides of the disclosure comprise, consist, or consist essentially of an amino acid sequence that is at least 70%, 75%, 80%, 85%, 86%, 87%, 88%, 89%, 90%, 91%, 92%, 93%, 94%, 95%, 96%, 97%, 98%, 99%, or 100% identical to the amino acid sequence of SEQ ID NO: 398. The amino acid sequence of SEQ ID NO: 398 may optionally be provided with the lysine removed from the C-terminus. The G1Fc region may also comprise a mutation to an alanine at position 234 or a mutation to an alanine at position 235, or a combination thereof. In some embodiments, variant ActRIIB polypeptides or variant ActRIIB-Fc fusion polypeptides of the disclosure comprise, consist, or consist essentially of an amino acid sequence that is at least 70%, 75%, 80%, 85%, 86%, 87%, 88%, 89%, 90%, 91%, 92%, 93%, 94%, 95%, 96%, 97%, 98%, 99%, or 100% identical to the amino acid sequence of SEQ ID NO: 399. The amino acid sequence of SEQ ID NO: 399 may optionally be provided with the lysine removed from the C-terminus. The G1Fc region may also comprise a mutation to an alanine at position 234 or a mutation to an alanine at position 235, or a combination thereof. In some embodiments, variant ActRIIB polypeptides or variant ActRIIB-Fc fusion polypeptides of the disclosure comprise, consist, or consist essentially of an amino acid sequence that is at least 70%, 75%, 80%, 85%, 86%, 87%, 88%, 89%, 90%, 91%, 92%, 93%, 94%, 95%, 96%, 97%, 98%, 99%, or 100% identical to the amino acid sequence of SEQ ID NO: 401. The amino acid sequence of SEQ ID NO: 401 may optionally be provided with the lysine removed from the C-terminus. The G1Fc region may also comprise a mutation to an alanine at position 234 or a mutation to an alanine at position 235, or a combination thereof. In some embodiments, variant ActRIIB polypeptides or variant ActRIIB-Fc fusion polypeptides of the disclosure comprise, consist, or consist essentially of an amino acid sequence that is at least 70%, 75%, 80%, 85%, 86%, 87%, 88%, 89%, 90%, 91%, 92%, 93%, 94%, 95%, 96%, 97%, 98%, 99%, or 100% identical to the amino acid sequence of SEQ ID NO: 402. The amino acid sequence of SEQ ID NO: 402 may optionally be provided with the lysine removed from the C-terminus. The G1Fc region may also comprise a mutation to an alanine at position 234 or a mutation to an alanine at position 235, or a combination thereof. In some embodiments, variant ActRIIB polypeptides or variant ActRIIB-Fc fusion polypeptides of the disclosure comprise, consist, or consist essentially of an amino acid sequence that is at least 70%, 75%, 80%, 85%, 86%, 87%, 88%, 89%, 90%, 91%, 92%, 93%, 94%, 95%, 96%, 97%, 98%, 99%, or 100% identical to the amino acid sequence of SEQ ID NO: 404. The amino acid sequence of SEQ ID NO: 404 may optionally be provided with the lysine removed from the C-terminus. The G1Fc region may also comprise a mutation to an alanine at position 234 or a mutation to an alanine at position 235, or a combination thereof. In some embodiments, variant ActRIIB polypeptides or variant ActRIIB-Fc fusion polypeptides of the disclosure comprise, consist, or consist essentially of an amino acid sequence that is at least 70%, 75%, 80%, 85%, 86%, 87%, 88%, 89%, 90%, 91%, 92%, 93%, 94%, 95%, 96%, 97%, 98%, 99%, or 100% identical to the amino acid sequence of SEQ ID NO: 405. The amino acid sequence of SEQ ID NO: 405 may optionally be provided with the lysine removed from the C-terminus. The G1Fc region may also comprise a mutation to an alanine at position 234 or a mutation to an alanine at position 235, or a combination thereof. In some embodiments, variant ActRIIB polypeptides or variant ActRIIB-Fc fusion polypeptides of the disclosure comprise, consist, or consist essentially of an amino acid sequence that is at least 70%, 75%, 80%, 85%, 86%, 87%, 88%, 89%, 90%, 91%, 92%, 93%, 94%, 95%, 96%, 97%, 98%, 99%, or 100% identical to the amino acid sequence of SEQ ID NO: 407. The amino acid sequence of SEQ ID NO: 407 may optionally be provided with the lysine removed from the C-terminus. The G1Fc region may also comprise a mutation to an alanine at position 234 or a mutation to an alanine at position 235, or a combination thereof. In some embodiments, variant ActRIIB polypeptides or variant ActRIIB-Fc fusion polypeptides of the disclosure comprise, consist, or consist essentially of an amino acid sequence that is at least 70%, 75%, 80%, 85%, 86%, 87%, 88%, 89%, 90%, 91%, 92%, 93%, 94%, 95%, 96%, 97%, 98%, 99%, or 100% identical to the amino acid sequence of SEQ ID NO: 408. The amino acid sequence of SEQ ID NO: 408 may optionally be provided with the lysine removed from the C-terminus. The G1Fc region may also comprise a mutation to an alanine at position 234 or a mutation to an alanine at position 235, or a combination thereof. In some embodiments, variant ActRIIB polypeptides or variant ActRIIB-Fc fusion polypeptides of the disclosure comprise, consist, or consist essentially of an amino acid sequence that is at least 70%, 75%, 80%, 85%, 86%, 87%, 88%, 89%, 90%, 91%, 92%, 93%, 94%, 95%, 96%, 97%, 98%, 99%, or 100% identical to the amino acid sequence of SEQ ID NO: 410. The amino acid sequence of SEQ ID NO: 410 may optionally be provided with the lysine removed from the C-terminus. The G1Fc region may also comprise a mutation to an alanine at position 234 or a mutation to an alanine at position 235, or a combination thereof. In some embodiments, variant ActRIIB polypeptides or variant ActRIIB-Fc fusion polypeptides of the disclosure comprise, consist, or consist essentially of an amino acid sequence that is at least 70%, 75%, 80%, 85%, 86%, 87%, 88%, 89%, 90%, 91%, 92%, 93%, 94%, 95%, 96%, 97%, 98%, 99%, or 100% identical to the amino acid sequence of SEQ ID NO: 411. The amino acid sequence of SEQ ID NO: 411 may optionally be provided with the lysine removed from the C-terminus. The G1Fc region may also comprise a mutation to an alanine at position 234 or a mutation to an alanine at position 235, or a combination thereof. In some embodiments, variant ActRIIB polypeptides or variant ActRIIB-Fc fusion polypeptides of the disclosure comprise, consist, or consist essentially of an amino acid sequence that is at least 70%, 75%, 80%, 85%, 86%, 87%, 88%, 89%, 90%, 91%, 92%, 93%, 94%, 95%, 96%, 97%, 98%, 99%, or 100% identical to the amino acid sequence of SEQ ID NO: 413. The amino acid sequence of SEQ ID NO: 413 may optionally be provided with the lysine removed from the C-terminus. The G1Fc region may also comprise a mutation to an alanine at position 234 or a mutation to an alanine at position 235, or a combination thereof. In some embodiments, variant ActRIIB polypeptides or variant ActRIIB-Fc fusion polypeptides of the disclosure comprise, consist, or consist essentially of an amino acid sequence that is at least 70%, 75%, 80%, 85%, 86%, 87%, 88%, 89%, 90%, 91%, 92%, 93%, 94%, 95%, 96%, 97%, 98%, 99%, or 100% identical to the amino acid sequence of SEQ ID NO: 414. The amino acid sequence of SEQ ID NO: 414 may optionally be provided with the lysine removed from the C-terminus. The G1Fc region may also comprise a mutation to an alanine at position 234 or a mutation to an alanine at position 235, or a combination thereof. In some embodiments, variant ActRIIB polypeptides or variant ActRIIB-Fc fusion polypeptides of the disclosure comprise, consist, or consist essentially of an amino acid sequence that is at least 70%, 75%, 80%, 85%, 86%, 87%, 88%, 89%, 90%, 91%, 92%, 93%, 94%, 95%, 96%, 97%, 98%, 99%, or 100% identical to the amino acid sequence of SEQ ID NO: 416. The amino acid sequence of SEQ ID NO: 416 may optionally be provided with the lysine removed from the C-terminus. The G1Fc region may also comprise a mutation to an alanine at position 234 or a mutation to an alanine at position 235, or a combination thereof. In some embodiments, variant ActRIIB polypeptides or variant ActRIIB-Fc fusion polypeptides of the disclosure comprise, consist, or consist essentially of an amino acid sequence that is at least 70%, 75%, 80%, 85%, 86%, 87%, 88%, 89%, 90%, 91%, 92%, 93%, 94%, 95%, 96%, 97%, 98%, 99%, or 100% identical to the amino acid sequence of SEQ ID NO: 417. The amino acid sequence of SEQ ID NO: 417 may optionally be provided with the lysine removed from the C-terminus. The G1Fc region may also comprise a mutation to an alanine at position 234 or a mutation to an alanine at position 235, or a combination thereof. In some embodiments, variant ActRIIB polypeptides or variant ActRIIB-Fc fusion polypeptides of the disclosure comprise, consist, or consist essentially of an amino acid sequence that is at least 70%, 75%, 80%, 85%, 86%, 87%, 88%, 89%, 90%, 91%, 92%, 93%, 94%, 95%, 96%, 97%, 98%, 99%, or 100% identical to the amino acid sequence of SEQ ID NO: 419. The amino acid sequence of SEQ ID NO: 419 may optionally be provided with the lysine removed from the C-terminus. The G1Fc region may also comprise a mutation to an alanine at position 234 or a mutation to an alanine at position 235, or a combination thereof. In some embodiments, variant ActRIIB polypeptides or variant ActRIIB-Fc fusion polypeptides of the disclosure comprise, consist, or consist essentially of an amino acid sequence that is at least 70%, 75%, 80%, 85%, 86%, 87%, 88%, 89%, 90%, 91%, 92%, 93%, 94%, 95%, 96%, 97%, 98%, 99%, or 100% identical to the amino acid sequence of SEQ ID NO: 420. The amino acid sequence of SEQ ID NO: 420 may optionally be provided with the lysine removed from the C-terminus. The G1Fc region may also comprise a mutation to an alanine at position 234 or a mutation to an alanine at position 235, or a combination thereof. In some embodiments, variant ActRIIB polypeptides or variant ActRIIB-Fc fusion polypeptides of the disclosure comprise, consist, or consist essentially of an amino acid sequence that is at least 70%, 75%, 80%, 85%, 86%, 87%, 88%, 89%, 90%, 91%, 92%, 93%, 94%, 95%, 96%, 97%, 98%, 99%, or 100% identical to the amino acid sequence of SEQ ID NO: 422. The amino acid sequence of SEQ ID NO: 422 may optionally be provided with the lysine removed from the C-terminus. The G1Fc region may also comprise a mutation to an alanine at position 234 or a mutation to an alanine at position 235, or a combination thereof. In some embodiments, variant ActRIIB polypeptides or variant ActRIIB-Fc fusion polypeptides of the disclosure comprise, consist, or consist essentially of an amino acid sequence that is at least 70%, 75%, 80%, 85%, 86%, 87%, 88%, 89%, 90%, 91%, 92%, 93%, 94%, 95%, 96%, 97%, 98%, 99%, or 100% identical to the amino acid sequence of SEQ ID NO: 423. The amino acid sequence of SEQ ID NO: 423 may optionally be provided with the lysine removed from the C-terminus. The G1Fc region may also comprise a mutation to an alanine at position 234 or a mutation to an alanine at position 235, or a combination thereof. In some embodiments, variant ActRIIB polypeptides or variant ActRIIB-Fc fusion polypeptides of the disclosure comprise, consist, or consist essentially of an amino acid sequence that is at least 70%, 75%, 80%, 85%, 86%, 87%, 88%, 89%, 90%, 91%, 92%, 93%, 94%, 95%, 96%, 97%, 98%, 99%, or 100% identical to the amino acid sequence of SEQ ID NO: 425. The amino acid sequence of SEQ ID NO: 425 may optionally be provided with the lysine removed from the C-terminus. The G1Fc region may also comprise a mutation to an alanine at position 234 or a mutation to an alanine at position 235, or a combination thereof. In some embodiments, variant ActRIIB polypeptides or variant ActRIIB-Fc fusion polypeptides of the disclosure comprise, consist, or consist essentially of an amino acid sequence that is at least 70%, 75%, 80%, 85%, 86%, 87%, 88%, 89%, 90%, 91%, 92%, 93%, 94%, 95%, 96%, 97%, 98%, 99%, or 100% identical to the amino acid sequence of SEQ ID NO: 426. The amino acid sequence of SEQ ID NO: 426 may optionally be provided with the lysine removed from the C-terminus. The G1Fc region may also comprise a mutation to an alanine at position 234 or a mutation to an alanine at position 235, or a combination thereof. In some embodiments, variant ActRIIB polypeptides or variant ActRIIB-Fc fusion polypeptides of the disclosure comprise, consist, or consist essentially of an amino acid sequence that is at least 70%, 75%, 80%, 85%, 86%, 87%, 88%, 89%, 90%, 91%, 92%, 93%, 94%, 95%, 96%, 97%, 98%, 99%, or 100% identical to the amino acid sequence of SEQ ID NO: 428. The amino acid sequence of SEQ ID NO: 428 may optionally be provided with the lysine removed from the C-terminus. The G1Fc region may also comprise a mutation to an alanine at position 234 or a mutation to an alanine at position 235, or a combination thereof. In some embodiments, variant ActRIIB polypeptides or variant ActRIIB-Fc fusion polypeptides of the disclosure comprise, consist, or consist essentially of an amino acid sequence that is at least 70%, 75%, 80%, 85%, 86%, 87%, 88%, 89%, 90%, 91%, 92%, 93%, 94%, 95%, 96%, 97%, 98%, 99%, or 100% identical to the amino acid sequence of SEQ ID NO: 429. The amino acid sequence of SEQ ID NO: 429 may optionally be provided with the lysine removed from the C-terminus. The G1Fc region may also comprise a mutation to an alanine at position 234 or a mutation to an alanine at position 235, or a combination thereof. In some embodiments, variant ActRIIB polypeptides or variant ActRIIB-Fc fusion polypeptides of the disclosure comprise, consist, or consist essentially of an amino acid sequence that is at least 70%, 75%, 80%, 85%, 86%, 87%, 88%, 89%, 90%, 91%, 92%, 93%, 94%, 95%, 96%, 97%, 98%, 99%, or 100% identical to the amino acid sequence of SEQ ID NO: 431. The amino acid sequence of SEQ ID NO: 431 may optionally be provided with the lysine removed from the C-terminus. The G1Fc region may also comprise a mutation to an alanine at position 234 or a mutation to an alanine at position 235, or a combination thereof. In some embodiments, variant ActRIIB polypeptides or variant ActRIIB-Fc fusion polypeptides of the disclosure comprise, consist, or consist essentially of an amino acid sequence that is at least 70%, 75%, 80%, 85%, 86%, 87%, 88%, 89%, 90%, 91%, 92%, 93%, 94%, 95%, 96%, 97%, 98%, 99%, or 100% identical to the amino acid sequence of SEQ ID NO: 432. The amino acid sequence of SEQ ID NO: 432 may optionally be provided with the lysine removed from the C-terminus. The G1Fc region may also comprise a mutation to an alanine at position 234 or a mutation to an alanine at position 235, or a combination thereof. In some embodiments, variant ActRIIB polypeptides or variant ActRIIB-Fc fusion polypeptides of the disclosure comprise, consist, or consist essentially of an amino acid sequence that is at least 70%, 75%, 80%, 85%, 86%, 87%, 88%, 89%, 90%, 91%, 92%, 93%, 94%, 95%, 96%, 97%, 98%, 99%, or 100% identical to the amino acid sequence of SEQ ID NO: 434. The amino acid sequence of SEQ ID NO: 434 may optionally be provided with the lysine removed from the C-terminus. The G1Fc region may also comprise a mutation to an alanine at position 234 or a mutation to an alanine at position 235, or a combination thereof. In some embodiments, variant ActRIIB polypeptides or variant ActRIIB-Fc fusion polypeptides of the disclosure comprise, consist, or consist essentially of an amino acid sequence that is at least 70%, 75%, 80%, 85%, 86%, 87%, 88%, 89%, 90%, 91%, 92%, 93%, 94%, 95%, 96%, 97%, 98%, 99%, or 100% identical to the amino acid sequence of SEQ ID NO: 435. The amino acid sequence of SEQ ID NO: 435 may optionally be provided with the lysine removed from the C-terminus. The G1Fc region may also comprise a mutation to an alanine at position 234 or a mutation to an alanine at position 235, or a combination thereof. In some embodiments, variant ActRIIB polypeptides or variant ActRIIB-Fc fusion polypeptides of the disclosure comprise, consist, or consist essentially of an amino acid sequence that is at least 70%, 75%, 80%, 85%, 86%, 87%, 88%, 89%, 90%, 91%, 92%, 93%, 94%, 95%, 96%, 97%, 98%, 99%, or 100% identical to the amino acid sequence of SEQ ID NO: 437. The amino acid sequence of SEQ ID NO: 437 may optionally be provided with the lysine removed from the C-terminus. The G1Fc region may also comprise a mutation to an alanine at position 234 or a mutation to an alanine at position 235, or a combination thereof. In some embodiments, variant ActRIIB polypeptides or variant ActRIIB-Fc fusion polypeptides of the disclosure comprise, consist, or consist essentially of an amino acid sequence that is at least 70%, 75%, 80%, 85%, 86%, 87%, 88%, 89%, 90%, 91%, 92%, 93%, 94%, 95%, 96%, 97%, 98%, 99%, or 100% identical to the amino acid sequence of SEQ ID NO: 438. The amino acid sequence of SEQ ID NO: 438 may optionally be provided with the lysine removed from the C-terminus. The G1Fc region may also comprise a mutation to an alanine at position 234 or a mutation to an alanine at position 235, or a combination thereof. In some embodiments, variant ActRIIB polypeptides or variant ActRIIB-Fc fusion polypeptides of the disclosure comprise, consist, or consist essentially of an amino acid sequence that is at least 70%, 75%, 80%, 85%, 86%, 87%, 88%, 89%, 90%, 91%, 92%, 93%, 94%, 95%, 96%, 97%, 98%, 99%, or 100% identical to the amino acid sequence of SEQ ID NO: 440. The amino acid sequence of SEQ ID NO: 440 may optionally be provided with the lysine removed from the C-terminus. The G1Fc region may also comprise a mutation to an alanine at position 234 or a mutation to an alanine at position 235, or a combination thereof. In some embodiments, variant ActRIIB polypeptides or variant ActRIIB-Fc fusion polypeptides of the disclosure comprise, consist, or consist essentially of an amino acid sequence that is at least 70%, 75%, 80%, 85%, 86%, 87%, 88%, 89%, 90%, 91%, 92%, 93%, 94%, 95%, 96%, 97%, 98%, 99%, or 100% identical to the amino acid sequence of SEQ ID NO: 441. The amino acid sequence of SEQ ID NO: 441 may optionally be provided with the lysine removed from the C-terminus. The G1Fc region may also comprise a mutation to an alanine at position 234 or a mutation to an alanine at position 235, or a combination thereof. In some embodiments, variant ActRIIB polypeptides or variant ActRIIB-Fc fusion polypeptides of the disclosure comprise, consist, or consist essentially of an amino acid sequence that is at least 70%, 75%, 80%, 85%, 86%, 87%, 88%, 89%, 90%, 91%, 92%, 93%, 94%, 95%, 96%, 97%, 98%, 99%, or 100% identical to the amino acid sequence of SEQ ID NO: 443. The amino acid sequence of SEQ ID NO: 443 may optionally be provided with the lysine removed from the C-terminus. The G1Fc region may also comprise a mutation to an alanine at position 234 or a mutation to an alanine at position 235, or a combination thereof. In some embodiments, variant ActRIIB polypeptides or variant ActRIIB-Fc fusion polypeptides of the disclosure comprise, consist, or consist essentially of an amino acid sequence that is at least 70%, 75%, 80%, 85%, 86%, 87%, 88%, 89%, 90%, 91%, 92%, 93%, 94%, 95%, 96%, 97%, 98%, 99%, or 100% identical to the amino acid sequence of SEQ ID NO: 444. The amino acid sequence of SEQ ID NO: 444 may optionally be provided with the lysine removed from the C-terminus. The G1Fc region may also comprise a mutation to an alanine at position 234 or a mutation to an alanine at position 235, or a combination thereof. In some embodiments, variant ActRIIB polypeptides or variant ActRIIB-Fc fusion polypeptides of the disclosure comprise, consist, or consist essentially of an amino acid sequence that is at least 70%, 75%, 80%, 85%, 86%, 87%, 88%, 89%, 90%, 91%, 92%, 93%, 94%, 95%, 96%, 97%, 98%, 99%, or 100% identical to the amino acid sequence of SEQ ID NO: 446. The amino acid sequence of SEQ ID NO: 446 may optionally be provided with the lysine removed from the C-terminus. The G1Fc region may also comprise a mutation to an alanine at position 234 or a mutation to an alanine at position 235, or a combination thereof. In some embodiments, variant ActRIIB polypeptides or variant ActRIIB-Fc fusion polypeptides of the disclosure comprise, consist, or consist essentially of an amino acid sequence that is at least 70%, 75%, 80%, 85%, 86%, 87%, 88%, 89%, 90%, 91%, 92%, 93%, 94%, 95%, 96%, 97%, 98%, 99%, or 100% identical to the amino acid sequence of SEQ ID NO: 447. The amino acid sequence of SEQ ID NO: 447 may optionally be provided with the lysine removed from the C-terminus. The G1Fc region may also comprise a mutation to an alanine at position 234 or a mutation to an alanine at position 235, or a combination thereof. In some embodiments, variant ActRIIB polypeptides or variant ActRIIB-Fc fusion polypeptides of the disclosure comprise, consist, or consist essentially of an amino acid sequence that is at least 70%, 75%, 80%, 85%, 86%, 87%, 88%, 89%, 90%, 91%, 92%, 93%, 94%, 95%, 96%, 97%, 98%, 99%, or 100% identical to the amino acid sequence of SEQ ID NO: 449. The amino acid sequence of SEQ ID NO: 449 may optionally be provided with the lysine removed from the C-terminus. The G1Fc region may also comprise a mutation to an alanine at position 234 or a mutation to an alanine at position 235, or a combination thereof. In some embodiments, variant ActRIIB polypeptides or variant ActRIIB-Fc fusion polypeptides of the disclosure comprise, consist, or consist essentially of an amino acid sequence that is at least 70%, 75%, 80%, 85%, 86%, 87%, 88%, 89%, 90%, 91%, 92%, 93%, 94%, 95%, 96%, 97%, 98%, 99%, or 100% identical to the amino acid sequence of SEQ ID NO: 450. The amino acid sequence of SEQ ID NO: 450 may optionally be provided with the lysine removed from the C-terminus. The G1Fc region may also comprise a mutation to an alanine at position 234 or a mutation to an alanine at position 235, or a combination thereof. In some embodiments, variant ActRIIB polypeptides or variant ActRIIB-Fc fusion polypeptides of the disclosure comprise, consist, or consist essentially of an amino acid sequence that is at least 70%, 75%, 80%, 85%, 86%, 87%, 88%, 89%, 90%, 91%, 92%, 93%, 94%, 95%, 96%, 97%, 98%, 99%, or 100% identical to the amino acid sequence of SEQ ID NO: 452. The amino acid sequence of SEQ ID NO: 452 may optionally be provided with the lysine removed from the C-terminus. The G1Fc region may also comprise a mutation to an alanine at position 234 or a mutation to an alanine at position 235, or a combination thereof. In some embodiments, variant ActRIIB polypeptides or variant ActRIIB-Fc fusion polypeptides of the disclosure comprise, consist, or consist essentially of an amino acid sequence that is at least 70%, 75%, 80%, 85%, 86%, 87%, 88%, 89%, 90%, 91%, 92%, 93%, 94%, 95%, 96%, 97%, 98%, 99%, or 100% identical to the amino acid sequence of SEQ ID NO: 453. The amino acid sequence of SEQ ID NO: 453 may optionally be provided with the lysine removed from the C-terminus. The G1Fc region may also comprise a mutation to an alanine at position 234 or a mutation to an alanine at position 235, or a combination thereof. In some embodiments, variant ActRIIB polypeptides or variant ActRIIB-Fc fusion polypeptides of the disclosure comprise, consist, or consist essentially of an amino acid sequence that is at least 70%, 75%, 80%, 85%, 86%, 87%, 88%, 89%, 90%, 91%, 92%, 93%, 94%, 95%, 96%, 97%, 98%, 99%, or 100% identical to the amino acid sequence of SEQ ID NO: 455. The amino acid sequence of SEQ ID NO: 455 may optionally be provided with the lysine removed from the C-terminus. The G1Fc region may also comprise a mutation to an alanine at position 234 or a mutation to an alanine at position 235, or a combination thereof. In some embodiments, variant ActRIIB polypeptides or variant ActRIIB-Fc fusion polypeptides of the disclosure comprise, consist, or consist essentially of an amino acid sequence that is at least 70%, 75%, 80%, 85%, 86%, 87%, 88%, 89%, 90%, 91%, 92%, 93%, 94%, 95%, 96%, 97%, 98%, 99%, or 100% identical to the amino acid sequence of SEQ ID NO: 456. The amino acid sequence of SEQ ID NO: 456 may optionally be provided with the lysine removed from the C-terminus. The G1Fc region may also comprise a mutation to an alanine at position 234 or a mutation to an alanine at position 235, or a combination thereof. In some embodiments, variant ActRIIB polypeptides or variant ActRIIB-Fc fusion polypeptides of the disclosure comprise, consist, or consist essentially of an amino acid sequence that is at least 70%, 75%, 80%, 85%, 86%, 87%, 88%, 89%, 90%, 91%, 92%, 93%, 94%, 95%, 96%, 97%, 98%, 99%, or 100% identical to the amino acid sequence of SEQ ID NO: 458. The amino acid sequence of SEQ ID NO: 458 may optionally be provided with the lysine removed from the C-terminus. The G1Fc region may also comprise a mutation to an alanine at position 234 or a mutation to an alanine at position 235, or a combination thereof. In some embodiments, variant ActRIIB polypeptides or variant ActRIIB-Fc fusion polypeptides of the disclosure comprise, consist, or consist essentially of an amino acid sequence that is at least 70%, 75%, 80%, 85%, 86%, 87%, 88%, 89%, 90%, 91%, 92%, 93%, 94%, 95%, 96%, 97%, 98%, 99%, or 100% identical to the amino acid sequence of SEQ ID NO: 459. The amino acid sequence of SEQ ID NO: 459 may optionally be provided with the lysine removed from the C-terminus. The G1Fc region may also comprise a mutation to an alanine at position 234 or a mutation to an alanine at position 235, or a combination thereof. In some embodiments, variant ActRIIB polypeptides or variant ActRIIB-Fc fusion polypeptides of the disclosure comprise, consist, or consist essentially of an amino acid sequence that is at least 70%, 75%, 80%, 85%, 86%, 87%, 88%, 89%, 90%, 91%, 92%, 93%, 94%, 95%, 96%, 97%, 98%, 99%, or 100% identical to the amino acid sequence of SEQ ID NO: 461. The amino acid sequence of SEQ ID NO: 461 may optionally be provided with the lysine removed from the C-terminus. The G1Fc region may also comprise a mutation to an alanine at position 234 or a mutation to an alanine at position 235, or a combination thereof. In some embodiments, variant ActRIIB polypeptides or variant ActRIIB-Fc fusion polypeptides of the disclosure comprise, consist, or consist essentially of an amino acid sequence that is at least 70%, 75%, 80%, 85%, 86%, 87%, 88%, 89%, 90%, 91%, 92%, 93%, 94%, 95%, 96%, 97%, 98%, 99%, or 100% identical to the amino acid sequence of SEQ ID NO: 462. The amino acid sequence of SEQ ID NO: 462 may optionally be provided with the lysine removed from the C-terminus. The G1Fc region may also comprise a mutation to an alanine at position 234 or a mutation to an alanine at position 235, or a combination thereof. In some embodiments, variant ActRIIB polypeptides or variant ActRIIB-Fc fusion polypeptides of the disclosure comprise, consist, or consist essentially of an amino acid sequence that is at least 70%, 75%, 80%, 85%, 86%, 87%, 88%, 89%, 90%, 91%, 92%, 93%, 94%, 95%, 96%, 97%, 98%, 99%, or 100% identical to the amino acid sequence of SEQ ID NO: 464. The amino acid sequence of SEQ ID NO: 464 may optionally be provided with the lysine removed from the C-terminus. The G1Fc region may also comprise a mutation to an alanine at position 234 or a mutation to an alanine at position 235, or a combination thereof. In some embodiments, variant ActRIIB polypeptides or variant ActRIIB-Fc fusion polypeptides of the disclosure comprise, consist, or consist essentially of an amino acid sequence that is at least 70%, 75%, 80%, 85%, 86%, 87%, 88%, 89%, 90%, 91%, 92%, 93%, 94%, 95%, 96%, 97%, 98%, 99%, or 100% identical to the amino acid sequence of SEQ ID NO: 465. The amino acid sequence of SEQ ID NO: 465 may optionally be provided with the lysine removed from the C-terminus. The G1Fc region may also comprise a mutation to an alanine at position 234 or a mutation to an alanine at position 235, or a combination thereof. In some embodiments, variant ActRIIB polypeptides or variant ActRIIB-Fc fusion polypeptides of the disclosure comprise, consist, or consist essentially of an amino acid sequence that is at least 70%, 75%, 80%, 85%, 86%, 87%, 88%, 89%, 90%, 91%, 92%, 93%, 94%, 95%, 96%, 97%, 98%, 99%, or 100% identical to the amino acid sequence of SEQ ID NO: 467. The amino acid sequence of SEQ ID NO: 467 may optionally be provided with the lysine removed from the C-terminus. The G1Fc region may also comprise a mutation to an alanine at position 234 or a mutation to an alanine at position 235, or a combination thereof. In some embodiments, variant ActRIIB polypeptides or variant ActRIIB-Fc fusion polypeptides of the disclosure comprise, consist, or consist essentially of an amino acid sequence that is at least 70%, 75%, 80%, 85%, 86%, 87%, 88%, 89%, 90%, 91%, 92%, 93%, 94%, 95%, 96%, 97%, 98%, 99%, or 100% identical to the amino acid sequence of SEQ ID NO: 468. The amino acid sequence of SEQ ID NO: 468 may optionally be provided with the lysine removed from the C-terminus. The G1Fc region may also comprise a mutation to an alanine at position 234 or a mutation to an alanine at position 235, or a combination thereof. In some embodiments, variant ActRIIB polypeptides or variant ActRIIB-Fc fusion polypeptides of the disclosure comprise, consist, or consist essentially of an amino acid sequence that is at least 70%, 75%, 80%, 85%, 86%, 87%, 88%, 89%, 90%, 91%, 92%, 93%, 94%, 95%, 96%, 97%, 98%, 99%, or 100% identical to the amino acid sequence of SEQ ID NO: 470. The amino acid sequence of SEQ ID NO: 470 may optionally be provided with the lysine removed from the C-terminus. The G1Fc region may also comprise a mutation to an alanine at position 234 or a mutation to an alanine at position 235, or a combination thereof. In some embodiments, variant ActRIIB polypeptides or variant ActRIIB-Fc fusion polypeptides of the disclosure comprise, consist, or consist essentially of an amino acid sequence that is at least 70%, 75%, 80%, 85%, 86%, 87%, 88%, 89%, 90%, 91%, 92%, 93%, 94%, 95%, 96%, 97%, 98%, 99%, or 100% identical to the amino acid sequence of SEQ ID NO: 471. The amino acid sequence of SEQ ID NO: 471 may optionally be provided with the lysine removed from the C-terminus. The G1Fc region may also comprise a mutation to an alanine at position 234 or a mutation to an alanine at position 235, or a combination thereof. In some embodiments, variant ActRIIB polypeptides or variant ActRIIB-Fc fusion polypeptides of the disclosure comprise, consist, or consist essentially of an amino acid sequence that is at least 70%, 75%, 80%, 85%, 86%, 87%, 88%, 89%, 90%, 91%, 92%, 93%, 94%, 95%, 96%, 97%, 98%, 99%, or 100% identical to the amino acid sequence of SEQ ID NO: 473. The amino acid sequence of SEQ ID NO: 473 may optionally be provided with the lysine removed from the C-terminus. The G1Fc region may also comprise a mutation to an alanine at position 234 or a mutation to an alanine at position 235, or a combination thereof. In some embodiments, variant ActRIIB polypeptides or variant ActRIIB-Fc fusion polypeptides of the disclosure comprise, consist, or consist essentially of an amino acid sequence that is at least 70%, 75%, 80%, 85%, 86%, 87%, 88%, 89%, 90%, 91%, 92%, 93%, 94%, 95%, 96%, 97%, 98%, 99%, or 100% identical to the amino acid sequence of SEQ ID NO: 474. The amino acid sequence of SEQ ID NO: 474 may optionally be provided with the lysine removed from the C-terminus. The G1Fc region may also comprise a mutation to an alanine at position 234 or a mutation to an alanine at position 235, or a combination thereof. In some embodiments, variant ActRIIB polypeptides or variant ActRIIB-Fc fusion polypeptides of the disclosure comprise, consist, or consist essentially of an amino acid sequence that is at least 70%, 75%, 80%, 85%, 86%, 87%, 88%, 89%, 90%, 91%, 92%, 93%, 94%, 95%, 96%, 97%, 98%, 99%, or 100% identical to the amino acid sequence of SEQ ID NO: 476. The amino acid sequence of SEQ ID NO: 476 may optionally be provided with the lysine removed from the C-terminus. The G1Fc region may also comprise a mutation to an alanine at position 234 or a mutation to an alanine at position 235, or a combination thereof. In some embodiments, variant ActRIIB polypeptides or variant ActRIIB-Fc fusion polypeptides of the disclosure comprise, consist, or consist essentially of an amino acid sequence that is at least 70%, 75%, 80%, 85%, 86%, 87%, 88%, 89%, 90%, 91%, 92%, 93%, 94%, 95%, 96%, 97%, 98%, 99%, or 100% identical to the amino acid sequence of SEQ ID NO: 477. The amino acid sequence of SEQ ID NO: 477 may optionally be provided with the lysine removed from the C-terminus. The G1Fc region may also comprise a mutation to an alanine at position 234 or a mutation to an alanine at position 235, or a combination thereof. In some embodiments, variant ActRIIB polypeptides or variant ActRIIB-Fc fusion polypeptides of the disclosure comprise, consist, or consist essentially of an amino acid sequence that is at least 70%, 75%, 80%, 85%, 86%, 87%, 88%, 89%, 90%, 91%, 92%, 93%, 94%, 95%, 96%, 97%, 98%, 99%, or 100% identical to the amino acid sequence of SEQ ID NO: 479. The amino acid sequence of SEQ ID NO: 479 may optionally be provided with the lysine removed from the C-terminus. The G1Fc region may also comprise a mutation to an alanine at position 234 or a mutation to an alanine at position 235, or a combination thereof. In some embodiments, variant ActRIIB polypeptides or variant ActRIIB-Fc fusion polypeptides of the disclosure comprise, consist, or consist essentially of an amino acid sequence that is at least 70%, 75%, 80%, 85%, 86%, 87%, 88%, 89%, 90%, 91%, 92%, 93%, 94%, 95%, 96%, 97%, 98%, 99%, or 100% identical to the amino acid sequence of SEQ ID NO: 480. The amino acid sequence of SEQ ID NO: 480 may optionally be provided with the lysine removed from the C-terminus. The G1Fc region may also comprise a mutation to an alanine at position 234 or a mutation to an alanine at position 235, or a combination thereof. In some embodiments, variant ActRIIB polypeptides or variant ActRIIB-Fc fusion polypeptides of the disclosure comprise, consist, or consist essentially of an amino acid sequence that is at least 70%, 75%, 80%, 85%, 86%, 87%, 88%, 89%, 90%, 91%, 92%, 93%, 94%, 95%, 96%, 97%, 98%, 99%, or 100% identical to the amino acid sequence of SEQ ID NO: 482. The amino acid sequence of SEQ ID NO: 482 may optionally be provided with the lysine removed from the C-terminus. The G1Fc region may also comprise a mutation to an alanine at position 234 or a mutation to an alanine at position 235, or a combination thereof. In some embodiments, variant ActRIIB polypeptides or variant ActRIIB-Fc fusion polypeptides of the disclosure comprise, consist, or consist essentially of an amino acid sequence that is at least 70%, 75%, 80%, 85%, 86%, 87%, 88%, 89%, 90%, 91%, 92%, 93%, 94%, 95%, 96%, 97%, 98%, 99%, or 100% identical to the amino acid sequence of SEQ ID NO: 483. The amino acid sequence of SEQ ID NO: 483 may optionally be provided with the lysine removed from the C-terminus. The G1Fc region may also comprise a mutation to an alanine at position 234 or a mutation to an alanine at position 235, or a combination thereof. In some embodiments, variant ActRIIB polypeptides or variant ActRIIB-Fc fusion polypeptides of the disclosure comprise, consist, or consist essentially of an amino acid sequence that is at least 70%, 75%, 80%, 85%, 86%, 87%, 88%, 89%, 90%, 91%, 92%, 93%, 94%, 95%, 96%, 97%, 98%, 99%, or 100% identical to the amino acid sequence of SEQ ID NO: 485. The amino acid sequence of SEQ ID NO: 485 may optionally be provided with the lysine removed from the C-terminus. The G1Fc region may also comprise a mutation to an alanine at position 234 or a mutation to an alanine at position 235, or a combination thereof. In some embodiments, variant ActRIIB polypeptides or variant ActRIIB-Fc fusion polypeptides of the disclosure comprise, consist, or consist essentially of an amino acid sequence that is at least 70%, 75%, 80%, 85%, 86%, 87%, 88%, 89%, 90%, 91%, 92%, 93%, 94%, 95%, 96%, 97%, 98%, 99%, or 100% identical to the amino acid sequence of SEQ ID NO: 486. The amino acid sequence of SEQ ID NO: 486 may optionally be provided with the lysine removed from the C-terminus. The G1Fc region may also comprise a mutation to an alanine at position 234 or a mutation to an alanine at position 235, or a combination thereof. In some embodiments, variant ActRIIB polypeptides or variant ActRIIB-Fc fusion polypeptides of the disclosure comprise, consist, or consist essentially of an amino acid sequence that is at least 70%, 75%, 80%, 85%, 86%, 87%, 88%, 89%, 90%, 91%, 92%, 93%, 94%, 95%, 96%, 97%, 98%, 99%, or 100% identical to the amino acid sequence of SEQ ID NO: 488. The amino acid sequence of SEQ ID NO: 488 may optionally be provided with the lysine removed from the C-terminus. The G1Fc region may also comprise a mutation to an alanine at position 234 or a mutation to an alanine at position 235, or a combination thereof. In some embodiments, variant ActRIIB polypeptides or variant ActRIIB-Fc fusion polypeptides of the disclosure comprise, consist, or consist essentially of an amino acid sequence that is at least 70%, 75%, 80%, 85%, 86%, 87%, 88%, 89%, 90%, 91%, 92%, 93%, 94%, 95%, 96%, 97%, 98%, 99%, or 100% identical to the amino acid sequence of SEQ ID NO: 489. The amino acid sequence of SEQ ID NO: 489 may optionally be provided with the lysine removed from the C-terminus. The G1Fc region may also comprise a mutation to an alanine at position 234 or a mutation to an alanine at position 235, or a combination thereof. In some embodiments, variant ActRIIB polypeptides or variant ActRIIB-Fc fusion polypeptides of the disclosure comprise, consist, or consist essentially of an amino acid sequence that is at least 70%, 75%, 80%, 85%, 86%, 87%, 88%, 89%, 90%, 91%, 92%, 93%, 94%, 95%, 96%, 97%, 98%, 99%, or 100% identical to the amino acid sequence of SEQ ID NO: 491. The amino acid sequence of SEQ ID NO: 491 may optionally be provided with the lysine removed from the C-terminus. The G1Fc region may also comprise a mutation to an alanine at position 234 or a mutation to an alanine at position 235, or a combination thereof. In some embodiments, variant ActRIIB polypeptides or variant ActRIIB-Fc fusion polypeptides of the disclosure comprise, consist, or consist essentially of an amino acid sequence that is at least 70%, 75%, 80%, 85%, 86%, 87%, 88%, 89%, 90%, 91%, 92%, 93%, 94%, 95%, 96%, 97%, 98%, 99%, or 100% identical to the amino acid sequence of SEQ ID NO: 492. The amino acid sequence of SEQ ID NO: 492 may optionally be provided with the lysine removed from the C-terminus. The G1Fc region may also comprise a mutation to an alanine at position 234 or a mutation to an alanine at position 235, or a combination thereof. In some embodiments, variant ActRIIB polypeptides or variant ActRIIB-Fc fusion polypeptides of the disclosure comprise, consist, or consist essentially of an amino acid sequence that is at least 70%, 75%, 80%, 85%, 86%, 87%, 88%, 89%, 90%, 91%, 92%, 93%, 94%, 95%, 96%, 97%, 98%, 99%, or 100% identical to the amino acid sequence of SEQ ID NO: 494. The amino acid sequence of SEQ ID NO: 494 may optionally be provided with the lysine removed from the C-terminus. The G1Fc region may also comprise a mutation to an alanine at position 234 or a mutation to an alanine at position 235, or a combination thereof. In some embodiments, variant ActRIIB polypeptides or variant ActRIIB-Fc fusion polypeptides of the disclosure comprise, consist, or consist essentially of an amino acid sequence that is at least 70%, 75%, 80%, 85%, 86%, 87%, 88%, 89%, 90%, 91%, 92%, 93%, 94%, 95%, 96%, 97%, 98%, 99%, or 100% identical to the amino acid sequence of SEQ ID NO: 495. The amino acid sequence of SEQ ID NO: 495 may optionally be provided with the lysine removed from the C-terminus. The G1Fc region may also comprise a mutation to an alanine at position 234 or a mutation to an alanine at position 235, or a combination thereof. In some embodiments, variant ActRIIB polypeptides or variant ActRIIB-Fc fusion polypeptides of the disclosure comprise, consist, or consist essentially of an amino acid sequence that is at least 70%, 75%, 80%, 85%, 86%, 87%, 88%, 89%, 90%, 91%, 92%, 93%, 94%, 95%, 96%, 97%, 98%, 99%, or 100% identical to the amino acid sequence of SEQ ID NO: 497. The amino acid sequence of SEQ ID NO: 497 may optionally be provided with the lysine removed from the C-terminus. The G1Fc region may also comprise a mutation to an alanine at position 234 or a mutation to an alanine at position 235, or a combination thereof. In some embodiments, variant ActRIIB polypeptides or variant ActRIIB-Fc fusion polypeptides of the disclosure comprise, consist, or consist essentially of an amino acid sequence that is at least 70%, 75%, 80%, 85%, 86%, 87%, 88%, 89%, 90%, 91%, 92%, 93%, 94%, 95%, 96%, 97%, 98%, 99%, or 100% identical to the amino acid sequence of SEQ ID NO: 498. The amino acid sequence of SEQ ID NO: 498 may optionally be provided with the lysine removed from the C-terminus. The G1Fc region may also comprise a mutation to an alanine at position 234 or a mutation to an alanine at position 235, or a combination thereof. In some embodiments, variant ActRIIB polypeptides or variant ActRIIB-Fc fusion polypeptides of the disclosure comprise, consist, or consist essentially of an amino acid sequence that is at least 70%, 75%, 80%, 85%, 86%, 87%, 88%, 89%, 90%, 91%, 92%, 93%, 94%, 95%, 96%, 97%, 98%, 99%, or 100% identical to the amino acid sequence of SEQ ID NO: 500. The amino acid sequence of SEQ ID NO: 500 may optionally be provided with the lysine removed from the C-terminus. The G1Fc region may also comprise a mutation to an alanine at position 234 or a mutation to an alanine at position 235, or a combination thereof. In some embodiments, variant ActRIIB polypeptides or variant ActRIIB-Fc fusion polypeptides of the disclosure comprise, consist, or consist essentially of an amino acid sequence that is at least 70%, 75%, 80%, 85%, 86%, 87%, 88%, 89%, 90%, 91%, 92%, 93%, 94%, 95%, 96%, 97%, 98%, 99%, or 100% identical to the amino acid sequence of SEQ ID NO: 501. The amino acid sequence of SEQ ID NO: 501 may optionally be provided with the lysine removed from the C-terminus. The G1Fc region may also comprise a mutation to an alanine at position 234 or a mutation to an alanine at position 235, or a combination thereof. In some embodiments, variant ActRIIB polypeptides or variant ActRIIB-Fc fusion polypeptides of the disclosure comprise, consist, or consist essentially of an amino acid sequence that is at least 70%, 75%, 80%, 85%, 86%, 87%, 88%, 89%, 90%, 91%, 92%, 93%, 94%, 95%, 96%, 97%, 98%, 99%, or 100% identical to the amino acid sequence of SEQ ID NO: 503. The amino acid sequence of SEQ ID NO: 503 may optionally be provided with the lysine removed from the C-terminus. The G1Fc region may also comprise a mutation to an alanine at position 234 or a mutation to an alanine at position 235, or a combination thereof. In some embodiments, variant ActRIIB polypeptides or variant ActRIIB-Fc fusion polypeptides of the disclosure comprise, consist, or consist essentially of an amino acid sequence that is at least 70%, 75%, 80%, 85%, 86%, 87%, 88%, 89%, 90%, 91%, 92%, 93%, 94%, 95%, 96%, 97%, 98%, 99%, or 100% identical to the amino acid sequence of SEQ ID NO: 504. The amino acid sequence of SEQ ID NO: 504 may optionally be provided with the lysine removed from the C-terminus. The G1Fc region may also comprise a mutation to an alanine at position 234 or a mutation to an alanine at position 235, or a combination thereof. In some embodiments, variant ActRIIB polypeptides or variant ActRIIB-Fc fusion polypeptides of the disclosure comprise, consist, or consist essentially of an amino acid sequence that is at least 70%, 75%, 80%, 85%, 86%, 87%, 88%, 89%, 90%, 91%, 92%, 93%, 94%, 95%, 96%, 97%, 98%, 99%, or 100% identical to the amino acid sequence of SEQ ID NO: 506. The amino acid sequence of SEQ ID NO: 506 may optionally be provided with the lysine removed from the C-terminus. The G1Fc region may also comprise a mutation to an alanine at position 234 or a mutation to an alanine at position 235, or a combination thereof. In some embodiments, variant ActRIIB polypeptides or variant ActRIIB-Fc fusion polypeptides of the disclosure comprise, consist, or consist essentially of an amino acid sequence that is at least 70%, 75%, 80%, 85%, 86%, 87%, 88%, 89%, 90%, 91%, 92%, 93%, 94%, 95%, 96%, 97%, 98%, 99%, or 100% identical to the amino acid sequence of SEQ ID NO: 507. The amino acid sequence of SEQ ID NO: 507 may optionally be provided with the lysine removed from the C-terminus. The G1Fc region may also comprise a mutation to an alanine at position 234 or a mutation to an alanine at position 235, or a combination thereof. In some embodiments, variant ActRIIB polypeptides or variant ActRIIB-Fc fusion polypeptides of the disclosure comprise, consist, or consist essentially of an amino acid sequence that is at least 70%, 75%, 80%, 85%, 86%, 87%, 88%, 89%, 90%, 91%, 92%, 93%, 94%, 95%, 96%, 97%, 98%, 99%, or 100% identical to the amino acid sequence of SEQ ID NO: 509. The amino acid sequence of SEQ ID NO: 509 may optionally be provided with the lysine removed from the C-terminus. The G1Fc region may also comprise a mutation to an alanine at position 234 or a mutation to an alanine at position 235, or a combination thereof. In some embodiments, variant ActRIIB polypeptides or variant ActRIIB-Fc fusion polypeptides of the disclosure comprise, consist, or consist essentially of an amino acid sequence that is at least 70%, 75%, 80%, 85%, 86%, 87%, 88%, 89%, 90%, 91%, 92%, 93%, 94%, 95%, 96%, 97%, 98%, 99%, or 100% identical to the amino acid sequence of SEQ ID NO: 510. The amino acid sequence of SEQ ID NO: 510 may optionally be provided with the lysine removed from the C-terminus. The G1Fc region may also comprise a mutation to an alanine at position 234 or a mutation to an alanine at position 235, or a combination thereof. In some embodiments, variant ActRIIB polypeptides or variant ActRIIB-Fc fusion polypeptides of the disclosure comprise, consist, or consist essentially of an amino acid sequence that is at least 70%, 75%, 80%, 85%, 86%, 87%, 88%, 89%, 90%, 91%, 92%, 93%, 94%, 95%, 96%, 97%, 98%, 99%, or 100% identical to the amino acid sequence of SEQ ID NO: 512. The amino acid sequence of SEQ ID NO: 512 may optionally be provided with the lysine removed from the C-terminus. The G1Fc region may also comprise a mutation to an alanine at position 234 or a mutation to an alanine at position 235, or a combination thereof. In some embodiments, variant ActRIIB polypeptides or variant ActRIIB-Fc fusion polypeptides of the disclosure comprise, consist, or consist essentially of an amino acid sequence that is at least 70%, 75%, 80%, 85%, 86%, 87%, 88%, 89%, 90%, 91%, 92%, 93%, 94%, 95%, 96%, 97%, 98%, 99%, or 100% identical to the amino acid sequence of SEQ ID NO: 513. The amino acid sequence of SEQ ID NO: 513 may optionally be provided with the lysine removed from the C-terminus. The G1Fc region may also comprise a mutation to an alanine at position 234 or a mutation to an alanine at position 235, or a combination thereof. In some embodiments, variant ActRIIB polypeptides or variant ActRIIB-Fc fusion polypeptides of the disclosure comprise, consist, or consist essentially of an amino acid sequence that is at least 70%, 75%, 80%, 85%, 86%, 87%, 88%, 89%, 90%, 91%, 92%, 93%, 94%, 95%, 96%, 97%, 98%, 99%, or 100% identical to the amino acid sequence of SEQ ID NO: 515. The amino acid sequence of SEQ ID NO: 515 may optionally be provided with the lysine removed from the C-terminus. The G1Fc region may also comprise a mutation to an alanine at position 234 or a mutation to an alanine at position 235, or a combination thereof. In some embodiments, variant ActRIIB polypeptides or variant ActRIIB-Fc fusion polypeptides of the disclosure comprise, consist, or consist essentially of an amino acid sequence that is at least 70%, 75%, 80%, 85%, 86%, 87%, 88%, 89%, 90%, 91%, 92%, 93%, 94%, 95%, 96%, 97%, 98%, 99%, or 100% identical to the amino acid sequence of SEQ ID NO: 516. The amino acid sequence of SEQ ID NO: 516 may optionally be provided with the lysine removed from the C-terminus. The G1Fc region may also comprise a mutation to an alanine at position 234 or a mutation to an alanine at position 235, or a combination thereof. In some embodiments, variant ActRIIB polypeptides or variant ActRIIB-Fc fusion polypeptides of the disclosure comprise, consist, or consist essentially of an amino acid sequence that is at least 70%, 75%, 80%, 85%, 86%, 87%, 88%, 89%, 90%, 91%, 92%, 93%, 94%, 95%, 96%, 97%, 98%, 99%, or 100% identical to the amino acid sequence of SEQ ID NO: 518. The amino acid sequence of SEQ ID NO: 518 may optionally be provided with the lysine removed from the C-terminus. The G1Fc region may also comprise a mutation to an alanine at position 234 or a mutation to an alanine at position 235, or a combination thereof. In some embodiments, variant ActRIIB polypeptides or variant ActRIIB-Fc fusion polypeptides of the disclosure comprise, consist, or consist essentially of an amino acid sequence that is at least 70%, 75%, 80%, 85%, 86%, 87%, 88%, 89%, 90%, 91%, 92%, 93%, 94%, 95%, 96%, 97%, 98%, 99%, or 100% identical to the amino acid sequence of SEQ ID NO: 522. The amino acid sequence of SEQ ID NO: 522 may optionally be provided with the lysine removed from the C-terminus. In some embodiments, variant ActRIIB polypeptides or variant ActRIIB-Fc fusion polypeptides of the disclosure comprise, consist, or consist essentially of an amino acid sequence that is at least 70%, 75%, 80%, 85%, 86%, 87%, 88%, 89%, 90%, 91%, 92%, 93%, 94%, 95%, 96%, 97%, 98%, 99%, or 100% identical to the amino acid sequence of SEQ ID NO: 524. The amino acid sequence of SEQ ID NO: 524 may optionally be provided with the lysine removed from the C-terminus.

[0109] In certain aspects, the disclosure relates to variant ActRIIB polypeptides comprising an amino acid sequence that is at least 70%, 75%, 80%, 85%, 90%, 91%, 92%, 93%, 94%, 95%, 96%, 97%, 98%, 99%, or 100% identical to an amino acid sequence that begins at any one of amino acids 20-29 (e.g., amino acid residues 20, 21, 22, 23, 24, 25, 26, 27, 28, or 29) of SEQ ID NO: 2 and ends at any one of amino acids 109-134 (e.g., amino acid residues 109, 110, 111, 112, 113, 114, 115, 116, 117, 118, 119, 120, 121, 122, 123, 124, 125, 126, 127, 128, 129, 130, 131, 132, 133, or 134) of SEQ ID NO: 2, and wherein the polypeptide comprises one or more amino acid substitutions at a position of SEQ ID NO: 2 selected from the group consisting of:A24, S26, N35, E37, L38, R40, S44, L46, E50, E52, Q53, D54, K55, R56, L57, Y60, R64, N65, S67, G68, K74, W78, L79, D80, F82, N83, T93, E94, Q98, V99, E105, E106, F108, E111, R112, A119, G120, E123, P129, P130, and A132, as well as heteromultimer complexes comprising one or more such variant ActRIIB polypeptides. In certain aspects, the disclosure relates to variant ActRIIB polypeptides comprising an amino acid sequence that is at least 70%, 75%, 80%, 85%, 90%, 91%, 92%, 93%, 94%, 95%, 96%, 97%, 98%, 99%, or 100% identical to an amino acid sequence that begins at any one of amino acids 20-29 (e.g., amino acid residues 20, 21, 22, 23, 24, 25, 26, 27, 28, or 29) of SEQ ID NO: 2 and ends at any one of amino acids 109-134 (e.g., amino acid residues 109, 110, 111, 112, 113, 114, 115, 116, 117, 118, 119, 120, 121, 122, 123, 124, 125, 126, 127, 128, 129, 130, 131, 132, 133, or 134) of SEQ ID NO: 2, and wherein the polypeptide comprises one or more amino acid substitutions at a position of SEQ ID NO: 2 selected from the group consisting of: N35, E50, E52, K55, L57, Y60, G68, K74, W78, L79, F82, N83, E94, as well as heteromultimer complexes comprising one or more such variant ActRIIB polypeptides. In some embodiments, the variant ActRIIB polypeptide comprises an amino acid sequence that is at least 75%, 80%, 85%, 90%, 91%, 92%, 93%, 94%, 95%, 96%, 97%, 98%, 99%, or 100% identical to amino acids 29-109 of SEQ ID NO: 2. In some embodiments, the variant ActRIIB polypeptide comprises an amino acid sequence that is at least 75%, 80%, 85%, 90%, 91%, 92%, 93%, 94%, 95%, 96%, 97%, 98%, 99%, or 100% identical to amino acids 25-131 of SEQ ID NO: 2. In some embodiments, the variant ActRIIB polypeptide comprises an amino acid sequence that is at least 75%, 80%, 85%, 90%, 91%, 92%, 93%, 94%, 95%, 96%, 97%, 98%, 99%, or 100% identical to amino acids 20-134 of SEQ ID NO: 2. In some embodiments, the variant ActRIIB polypeptide comprises an amino acid sequence that is at least 75%, 80%, 85%, 90%, 91%, 92%, 93%, 94%, 95%, 96%, 97%, 98%, 99%, or 100% identical to the amino acid sequence of SEQ ID NO: 53. In some embodiments, the variant ActRIIB polypeptide comprises an amino acid sequence that is at least 75%, 80%, 85%, 90%, 91%, 92%, 93%, 94%, 95%, 96%, 97%, 98%, 99%, or 100% identical to the amino acid sequence of SEQ ID NO: 12. In some embodiments, the variant ActRIIB polypeptide comprises an amino acid sequence that is at least 75%, 80%, 85%, 90%, 91%, 92%, 93%, 94%, 95%, 96%, 97%, 98%, 99%, or 100% identical to the amino acid sequence of SEQ ID NO: 5. In some embodiments, the polypeptide comprises an amino acid substitution at the amino acid position corresponding to A24 of SEQ ID NO: 2. For example, in some embodiments, the substitution is A24N. In some embodiments, the polypeptide comprises an amino acid substitution at the amino acid position corresponding to S26 of SEQ ID NO: 2. For example, in some embodiments, the substitution is S26T. In some embodiments, the polypeptide comprises an amino acid substitution at the amino acid position corresponding to N35 of SEQ ID NO: 2. For example, in some embodiments, the substitution is N35E. In some embodiments, the polypeptide comprises an amino acid substitution at the amino acid position corresponding to E37 of SEQ ID NO: 2. For example, in some embodiments, the substitution is E37A. In some embodiments, the substitution is E37D. In some embodiments, the polypeptide comprises an amino acid substitution at the amino acid position corresponding to L38 of SEQ ID NO: 2. For example, in some embodiments, the substitution is L38N. In some embodiments, the polypeptide comprises an amino acid substitution at the amino acid position corresponding to R40 of SEQ ID NO: 2. For example, in some embodiments, the substitution is R40A. In some embodiments, the substitution is R40K. In some embodiments, the polypeptide comprises an amino acid substitution at the amino acid position corresponding to S44 of SEQ ID NO: 2. For example, in some embodiments, the substitution is S44T. In some embodiments, the polypeptide comprises an amino acid substitution at the amino acid position corresponding to L46 of SEQ ID NO: 2. For example, in some embodiments, the substitution is L46A. For example, in some embodiments, the substitution is L46I. For example, in some embodiments, the substitution is L46F. For example, in some embodiments, the substitution is L46V. In some embodiments, the polypeptide comprises an amino acid substitution at the amino acid position corresponding to E50 of SEQ ID NO: 2. For example, in some embodiments, the substitution is E50K. In some embodiments, the substitution is E50L. In some embodiments, the substitution is E50P. In some embodiments, the polypeptide comprises an amino acid substitution at the amino acid position corresponding to E52 of SEQ ID NO: 2. For example, in some embodiments, the substitution is E52A. In some embodiments, the substitution is E52D. In some embodiments, the substitution is E52G. In some embodiments, the substitution is E52H. In some embodiments, the substitution is E52K. In some embodiments, the substitution is E52N. In some embodiments, the substitution is E52P. In some embodiments, the substitution is E52R. In some embodiments, the substitution is E52S. In some embodiments, the substitution is E52T. In some embodiments, the substitution is E52Y. In some embodiments, the polypeptide comprises an amino acid substitution at the amino acid position corresponding to Q53 of SEQ ID NO: 2. For example, in some embodiments, the substitution is Q53R. For example, in some embodiments, the substitution is Q53K. For example, in some embodiments, the substitution is Q53N. For example, in some embodiments, the substitution is Q53H. In some embodiments, the polypeptide comprises an amino acid substitution at the amino acid position corresponding to D54 of SEQ ID NO: 2. For example, in some embodiments, the substitution is D54A. In some embodiments, the polypeptide comprises an amino acid substitution at the amino acid position corresponding to K55 of SEQ ID NO: 2. For example, in some embodiments, the substitution is K55A. In some embodiments, the substitution is K55E. In some embodiments, the substitution is K55D. In some embodiments, the substitution is K55R. In some embodiments, the polypeptide comprises an amino acid substitution at the amino acid position corresponding to R56 of SEQ ID NO: 2. For example, in some embodiments, the substitution is R56A. In some embodiments, the polypeptide comprises an amino acid substitution at the amino acid position corresponding to L57 of SEQ ID NO: 2. For example, in some embodiments, the substitution is L57R. In some embodiments, the substitution is L57E. In some embodiments, the substitution is L57I. In some embodiments, the substitution is L57T. In some embodiments, the substitution is L57V. In some embodiments, the polypeptide comprises an amino acid substitution at the amino acid position corresponding to Y60 of SEQ ID NO: 2. For example, in some embodiments, the substitution is Y60F. In some embodiments, the substitution is Y60D. In some embodiments, the substitution is Y60K. In some embodiments, the substitution is Y60P. In some embodiments, the polypeptide comprises an amino acid substitution at the amino acid position corresponding to R64 of SEQ ID NO: 2. For example, in some embodiments, the substitution is R64K. In some embodiments, the substitution is R64N. In some embodiments, the substitution is R64A. In some embodiments, the substitution is R64H. In some embodiments, the polypeptide comprises an amino acid substitution at the amino acid position corresponding to N65 of SEQ ID NO: 2. For example, in some embodiments, the substitution is N65A. In some embodiments, the polypeptide comprises an amino acid substitution at the amino acid position corresponding to S67 of SEQ ID NO: 2. For example, in some embodiments, the substitution is S67N. In some embodiments, the substitution is S67T. In some embodiments, the polypeptide comprises an amino acid substitution at the amino acid position corresponding to G68 of SEQ ID NO: 2. For example, in some embodiments, the substitution is G68R. In some embodiments, the polypeptide comprises an amino acid substitution at the amino acid position corresponding to K74 of SEQ ID NO: 2. For example, in some embodiments, the substitution is K74A. In some embodiments, the substitution is K74E. In some embodiments, the substitution is K74F. In some embodiments, the substitution is K74I. In some embodiments, the substitution is K74Y. In some embodiments, the substitution is K74R. In some embodiments, the polypeptide comprises an amino acid substitution at the amino acid position corresponding to W78 of SEQ ID NO: 2. For example, in some embodiments, the substitution is W78A. In some embodiments, the substitution is W78Y. In some embodiments, the polypeptide comprises an amino acid substitution at the amino acid position corresponding to L79 of SEQ ID NO: 2. For example, in some embodiments, the substitution is L79D. In some embodiments, the substitution does not comprise an acidic amino acid at the position corresponding to L79 of SEQ ID NO: 2. In some embodiments, the substitution does not comprise an aspartic acid (D) at the position corresponding to L79 of SEQ ID NO: 2. In some embodiments, the substitution is L79A. In some embodiments, the substitution is L79E. In some embodiments, the substitution is L79F. In some embodiments, the substitution is L79H. In some embodiments, the substitution is L79K. In some embodiments, the substitution is L79P. In some embodiments, the substitution is L79R. In some embodiments, the substitution is L79S. In some embodiments, the substitution is L79T. In some embodiments, the substitution is L79W. In some embodiments, the polypeptide comprises an amino acid substitution at the amino acid position corresponding to D80 of SEQ ID NO: 2. For example, in some embodiments, the substitution is D80A. In some embodiments, the substitution is D80F. In some embodiments, the substitution is D80K. In some embodiments, the substitution is D80G. In some embodiments, the substitution is D80M. In some embodiments, the substitution is D80I. In some embodiments, the substitution is D80N. In some embodiments, the substitution is D80R. In some embodiments, the polypeptide comprises an amino acid substitution at the amino acid position corresponding to F82 of SEQ ID NO: 2. For example, in some embodiments, the substitution is F82I. In some embodiments, the substitution is F82K. In some embodiments, the substitution is F82A. In some embodiments, the substitution is F82W. In some embodiments, the substitution is F82D. In some embodiments, the substitution is F82Y. In some embodiments, the substitution is F82E. In some embodiments, the substitution is F82L. In some embodiments, the substitution is F82T. In some embodiments, the substitution is F82S. In some embodiments, the polypeptide comprises an amino acid substitution at the amino acid position corresponding to N83 of SEQ ID NO: 2. For example, in some embodiments, the substitution is N83A. In some embodiments, the substitution is N83R. In some embodiments, the polypeptide comprises an amino acid substitution at the amino acid position corresponding to T93 of SEQ ID NO: 2. For example, in some embodiments, the substitution is T93D. In some embodiments, the substitution is T93E. In some embodiments, the substitution is T93H. In some embodiments, the substitution is T93G. In some embodiments, the substitution is T93K. In some embodiments, the substitution is T93P. In some embodiments, the substitution is T93R. In some embodiments, the substitution is T93S. In some embodiments, the substitution is T93Y. In some embodiments, the polypeptide comprises an amino acid substitution at the amino acid position corresponding to E94 of SEQ ID NO: 2. For example, in some embodiments, the substitution is E94K. In some embodiments, the polypeptide comprises an amino acid substitution at the amino acid position corresponding to Q98 of SEQ ID NO: 2. For example, in some embodiments, the substitution is Q98D. In some embodiments, the substitution is Q98E. In some embodiments, the substitution is Q98K. In some embodiments, the substitution is Q98R. In some embodiments, the polypeptide comprises an amino acid substitution at the amino acid position corresponding to V99 of SEQ ID NO: 2. For example, in some embodiments, the substitution is V99E. In some embodiments, the substitution is V99G. In some embodiments, the substitution is V99K. In some embodiments, the polypeptide comprises an amino acid substitution at the amino acid position corresponding to E105 of SEQ ID NO: 2. For example, in some embodiments, the substitution is E105N. In some embodiments, the polypeptide comprises an amino acid substitution at the amino acid position corresponding to E106 of SEQ ID NO: 2. For example, in some embodiments, the substitution is E106N. In some embodiments, the polypeptide comprises an amino acid substitution at the amino acid position corresponding to F108 of SEQ ID NO: 2. For example, in some embodiments, the substitution is F108I. In some embodiments, the substitution is F108L. In some embodiments, the substitution is F108V. In some embodiments, the substitution is F108Y. In some embodiments, the polypeptide comprises an amino acid substitution at the amino acid position corresponding to E111 of SEQ ID NO: 2. For example, in some embodiments, the substitution is E111K. In some embodiments, the substitution is E111D. In some embodiments, the substitution is E111R. In some embodiments, the substitution is E111H. In some embodiments, the substitution is E111Q. In some embodiments, the substitution is E111N. In some embodiments, the polypeptide comprises an amino acid substitution at the amino acid position corresponding to R112 of SEQ ID NO: 2. For example, in some embodiments, the substitution is R112H. In some embodiments, the substitution is R112K. In some embodiments, the substitution is R112N. In some embodiments, the substitution is R112S. In some embodiments, the substitution is R112T. In some embodiments, the polypeptide comprises an amino acid substitution at the amino acid position corresponding to A119 of SEQ ID NO: 2. For example, in some embodiments, the substitution is A119P. In some embodiments, the substitution is A119Y. In some embodiments, the polypeptide comprises an amino acid substitution at the amino acid position corresponding to G120 of SEQ ID NO: 2. For example, in some embodiments, the substitution is G120N. In some embodiments, the polypeptide comprises an amino acid substitution at the amino acid position corresponding to E123 of SEQ ID NO: 2. For example, in some embodiments, the substitution is E123N. In some embodiments, the polypeptide comprises an amino acid substitution at the amino acid position corresponding to P129 of SEQ ID NO: 2. For example, in some embodiments, the substitution is P129S. In some embodiments, the substitution is P129N. In some embodiments, the polypeptide comprises an amino acid substitution at the amino acid position corresponding to P130 of SEQ ID NO: 2. For example, in some embodiments, the substitution is P130A. In some embodiments, the substitution is P130R. In some embodiments, the polypeptide comprises an amino acid substitution at the amino acid position corresponding to A132 of SEQ ID NO: 2. For example, in some embodiments, the substitution is A132N.

[0110] In some embodiments, any of the variant ActRIIB polypeptides disclosed herein comprises a substitution at a position of SEQ ID NO: 2 selected from the group consisting of: A24, S26, N35, E37, L38, R40, S44, L46, E50, E52, Q53, D54, K55, R56, L57, Y60, R64, N65, S67, G68, K74, W78, L79, D80, F82, N83, T93, E94, Q98, V99, E105, E106, F108, E111, R112, A119, G120, E123, P129, P130, and A132. In some embodiments, any of the variant ActRIIB polypeptides disclosed herein comprises a substitution at a position of SEQ ID NO: 2 selected from the group consisting of: N35, E50, E52, K55, L57, Y60, G68, K74, W78, L79, F82, N83, E94. In some embodiments, the variant ActRIIB polypeptide comprises a substitution at position A24 with respect to SEQ ID NO: 2. In some embodiments, the variant ActRIIB polypeptide comprises a substitution at position S26 with respect to SEQ ID NO: 2. In some embodiments, the variant ActRIIB polypeptide comprises a substitution at position N35 with respect to SEQ ID NO: 2. In some embodiments, the variant ActRIIB polypeptide comprises a substitution at position E37 with respect to SEQ ID NO: 2. In some embodiments, the variant ActRIIB polypeptide comprises a substitution at position L38 with respect to SEQ ID NO: 2. In some embodiments, the variant ActRIIB polypeptide comprises a substitution at position R40 with respect to SEQ ID NO: 2. In some embodiments, the variant ActRIIB polypeptide comprises a substitution at position S44 with respect to SEQ ID NO: 2. In some embodiments, the variant ActRIIB polypeptide comprises a substitution at position D54 with respect to SEQ ID NO: 2. In some embodiments, the variant ActRIIB polypeptide comprises a substitution at position K55 with respect to SEQ ID NO: 2. In some embodiments, the variant ActRIIB polypeptide comprises a substitution at position L46 with respect to SEQ ID NO: 2. In some embodiments, the variant ActRIIB polypeptide comprises a substitution at position E50 with respect to SEQ ID NO: 2. In some embodiments, the variant ActRIIB polypeptide comprises a substitution at position E52 with respect to SEQ ID NO: 2. In some embodiments, the variant ActRIIB polypeptide comprises a substitution at position Q53 with respect to SEQ ID NO: 2. In some embodiments, the variant ActRIIB polypeptide comprises a substitution at position R56 with respect to SEQ ID NO: 2. In some embodiments, the variant ActRIIB polypeptide comprises a substitution at position L57 with respect to SEQ ID NO: 2. In some embodiments, the variant ActRIIB polypeptide comprises a substitution at position Y60 with respect to SEQ ID NO: 2. In some embodiments, the variant ActRIIB polypeptide comprises a substitution at position R64 with respect to SEQ ID NO: 2. In some embodiments, the variant ActRIIB polypeptide comprises a substitution at position N65 with respect to SEQ ID NO: 2. In some embodiments, the variant ActRIIB polypeptide comprises a substitution at position S67 with respect to SEQ ID NO: 2. In some embodiments, the variant ActRIIB polypeptide comprises a substitution at position G68 with respect to SEQ ID NO: 2. In some embodiments, the variant ActRIIB polypeptide comprises a substitution at position K74 with respect to SEQ ID NO: 2. In some embodiments, the variant ActRIIB polypeptide comprises a substitution at position W78 with respect to SEQ ID NO: 2. In some embodiments, the variant ActRIIB polypeptide comprises a substitution at position L79 with respect to SEQ ID NO: 2. In some embodiments, the variant ActRIIB polypeptide comprises a substitution at position D80 with respect to SEQ ID NO: 2. In some embodiments, the variant ActRIIB polypeptide comprises a substitution at position F82 with respect to SEQ ID NO: 2. In some embodiments, the variant ActRIIB polypeptide comprises a substitution at position N83 with respect to SEQ ID NO: 2. In some embodiments, the variant ActRIIB polypeptide comprises a substitution at position T93 with respect to SEQ ID NO: 2. In some embodiments, the variant ActRIIB polypeptide comprises a substitution at position E94 with respect to SEQ ID NO: 2. In some embodiments, the variant ActRIIB polypeptide comprises a substitution at position Q98 with respect to SEQ ID NO: 2. In some embodiments, the variant ActRIIB polypeptide comprises a substitution at position V99 with respect to SEQ ID NO: 2. In some embodiments, the variant ActRIIB polypeptide comprises a substitution at position E105 with respect to SEQ ID NO: 2. In some embodiments, the variant ActRIIB polypeptide comprises a substitution at position E106 with respect to SEQ ID NO: 2. In some embodiments, the variant ActRIIB polypeptide comprises a substitution at position F108 with respect to SEQ ID NO: 2. In some embodiments, the variant ActRIIB polypeptide comprises a substitution at position E111 with respect to SEQ ID NO: 2. In some embodiments, the variant ActRIIB polypeptide comprises a substitution at position R112 with respect to SEQ ID NO: 2. In some embodiments, the variant ActRIIB polypeptide comprises a substitution at position A119 with respect to SEQ ID NO: 2. In some embodiments, the variant ActRIIB polypeptide comprises a substitution at position G120 with respect to SEQ ID NO: 2. In some embodiments, the variant ActRIIB polypeptide comprises a substitution at position E123 with respect to SEQ ID NO: 2. In some embodiments, the variant ActRIIB polypeptide comprises a substitution at position P129 with respect to SEQ ID NO: 2. In some embodiments, the variant ActRIIB polypeptide comprises a substitution at position P130 with respect to SEQ ID NO: 2. In some embodiments, the variant ActRIIB polypeptide comprises a substitution at position A132 with respect to SEQ ID NO: 2.

[0111] In certain aspects, the disclosure relates to a variant ActRIIB polypeptide comprising an amino acid sequence that is at least 75%, 80%, 85%, 90%, 91%, 92%, 93%, 94%, 95%, 96%, 97%, 98%, 99%, or 100% identical to the amino acid sequence of SEQ ID NO: 31. In some embodiments, the variant ActRIIB polypeptide comprises an alanine at the position corresponding to K55 of SEQ ID NO: 2. In some embodiments, the amino acid sequence of SEQ ID NO: 31 may optionally be provided with the lysine removed from the C-terminus. The G1Fc region may also comprise a mutation to an alanine at position 234 or a mutation to an alanine at position 235, or a combination thereof.

[0112] In certain aspects, the disclosure relates to a variant ActRIIB polypeptide comprising an amino acid sequence that is at least 75%, 80%, 85%, 90%, 91%, 92%, 93%, 94%, 95%, 96%, 97%, 98%, 99%, or 100% identical to the amino acid sequence of SEQ ID NO: 33. In some embodiments, the variant ActRIIB polypeptide comprises an alanine at the position corresponding to K55 of SEQ ID NO: 2. In some embodiments, the amino acid sequence of SEQ ID NO: 33 may optionally be provided with the lysine removed from the C-terminus. The G1Fc region may also comprise a mutation to an alanine at position 234 or a mutation to an alanine at position 235, or a combination thereof.

[0113] In certain aspects, the disclosure relates to a variant ActRIIB polypeptide comprising an amino acid sequence that is at least 75%, 80%, 85%, 90%, 91%, 92%, 93%, 94%, 95%, 96%, 97%, 98%, 99%, or 100% identical to the amino acid sequence of SEQ ID NO: 34. In some embodiments, the variant ActRIIB polypeptide comprises a glutamic acid at the position corresponding to K55 of SEQ ID NO: 2. In some embodiments, the amino acid sequence of SEQ ID NO: 34 may optionally be provided with the lysine removed from the C-terminus. The G1Fc region may also comprise a mutation to an alanine at position 234 or a mutation to an alanine at position 235, or a combination thereof.

[0114] In certain aspects, the disclosure relates to a variant ActRIIB polypeptide comprising an amino acid sequence that is at least 75%, 80%, 85%, 90%, 91%, 92%, 93%, 94%, 95%, 96%, 97%, 98%, 99%, or 100% identical to the amino acid sequence of SEQ ID NO: 36. In some embodiments, the variant ActRIIB polypeptide comprises a glutamic acid at the position corresponding to K55 of SEQ ID NO: 2. In some embodiments, the amino acid sequence of SEQ ID NO: 36 may optionally be provided with the lysine removed from the C-terminus. The G1Fc region may also comprise a mutation to an alanine at position 234 or a mutation to an alanine at position 235, or a combination thereof.

[0115] In certain aspects, the disclosure relates to a variant ActRIIB polypeptide comprising an amino acid sequence that is at least 75%, 80%, 85%, 90%, 91%, 92%, 93%, 94%, 95%, 96%, 97%, 98%, 99%, or 100% identical to the amino acid sequence of SEQ ID NO: 37. In some embodiments, the variant ActRIIB polypeptide comprises an isoleucine at the position corresponding to F82 of SEQ ID NO: 2. In some embodiments, the amino acid sequence of SEQ ID NO: 37 may optionally be provided with the lysine removed from the C-terminus. The G1Fc region may also comprise a mutation to an alanine at position 234 or a mutation to an alanine at position 235, or a combination thereof.

[0116] In certain aspects, the disclosure relates to a variant ActRIIB polypeptide comprising an amino acid sequence that is at least 75%, 80%, 85%, 90%, 91%, 92%, 93%, 94%, 95%, 96%, 97%, 98%, 99%, or 100% identical to the amino acid sequence of SEQ ID NO: 39. In some embodiments, the variant ActRIIB polypeptide comprises an isoleucine at the position corresponding to F82 of SEQ ID NO: 2. In some embodiments, the amino acid sequence of SEQ ID NO: 39 may optionally be provided with the lysine removed from the C-terminus. The G1Fc region may also comprise a mutation to an alanine at position 234 or a mutation to an alanine at position 235, or a combination thereof.

[0117] In certain aspects, the disclosure relates to a variant ActRIIB polypeptide comprising an amino acid sequence that is at least 75%, 80%, 85%, 90%, 91%, 92%, 93%, 94%, 95%, 96%, 97%, 98%, 99%, or 100% identical to the amino acid sequence of SEQ ID NO: 40. In some embodiments, the variant ActRIIB polypeptide comprises a lysine at the position corresponding to F82 of SEQ ID NO: 2. In some embodiments, the amino acid sequence of SEQ ID NO: 40 may optionally be provided with the lysine removed from the C-terminus. The G1Fc region may also comprise a mutation to an alanine at position 234 or a mutation to an alanine at position 235, or a combination thereof.

[0118] In certain aspects, the disclosure relates to a variant ActRIIB polypeptide comprising an amino acid sequence that is at least 75%, 80%, 85%, 90%, 91%, 92%, 93%, 94%, 95%, 96%, 97%, 98%, 99%, or 100% identical to the amino acid sequence of SEQ ID NO: 42. In some embodiments, the variant ActRIIB polypeptide comprises a lysine at the position corresponding to F82 of SEQ ID NO: 2. In some embodiments, the amino acid sequence of SEQ ID NO: 42 may optionally be provided with the lysine removed from the C-terminus. The G1Fc region may also comprise a mutation to an alanine at position 234 or a mutation to an alanine at position 235, or a combination thereof.

[0119] In certain aspects, the disclosure relates to a variant ActRIIB polypeptide comprising an amino acid sequence that is at least 75%, 80%, 85%, 90%, 91%, 92%, 93%, 94%, 95%, 96%, 97%, 98%, 99%, or 100% identical to the amino acid sequence of SEQ ID NO: 43. In some embodiments, the variant ActRIIB polypeptide comprises a glutamic acid at the position corresponding to L79 of SEQ ID NO: 2. In some embodiments, the amino acid sequence of SEQ ID NO: 43 may optionally be provided with the lysine removed from the C-terminus. The G1Fc region may also comprise a mutation to an alanine at position 234 or a mutation to an alanine at position 235, or a combination thereof.

[0120] In certain aspects, the disclosure relates to a variant ActRIIB polypeptide comprising an amino acid sequence that is at least 75%, 80%, 85%, 90%, 91%, 92%, 93%, 94%, 95%, 96%, 97%, 98%, 99%, or 100% identical to the amino acid sequence of SEQ ID NO: 45. In some embodiments, the variant ActRIIB polypeptide comprises a glutamic acid at the position corresponding to L79 of SEQ ID NO: 2. In some embodiments, the amino acid sequence of SEQ ID NO: 45 may optionally be provided with the lysine removed from the C-terminus. The G1Fc region may also comprise a mutation to an alanine at position 234 or a mutation to an alanine at position 235, or a combination thereof.

[0121] In certain aspects, the disclosure relates to a variant ActRIIB polypeptide comprising an amino acid sequence that is at least 75%, 80%, 85%, 90%, 91%, 92%, 93%, 94%, 95%, 96%, 97%, 98%, 99%, or 100% identical to the amino acid sequence of SEQ ID NO: 336. In some embodiments, the variant ActRIIB polypeptide comprises a threonine at the position corresponding to F82 of SEQ ID NO: 2. In some embodiments, the amino acid sequence of SEQ ID NO: 336 may optionally be provided with the lysine removed from the C-terminus. The G1Fc region may also comprise a mutation to an alanine at position 234 or a mutation to an alanine at position 235, or a combination thereof.

[0122] In certain aspects, the disclosure relates to a variant ActRIIB polypeptide comprising an amino acid sequence that is at least 75%, 80%, 85%, 90%, 91%, 92%, 93%, 94%, 95%, 96%, 97%, 98%, 99%, or 100% identical to the amino acid sequence of SEQ ID NO: 338. In some embodiments, the variant ActRIIB polypeptide comprises a threonine at the position corresponding to F82 of SEQ ID NO: 2. In some embodiments, the amino acid sequence of SEQ ID NO: 338 may optionally be provided with the lysine removed from the C-terminus. The G1Fc region may also comprise a mutation to an alanine at position 234 or a mutation to an alanine at position 235, or a combination thereof.

[0123] In certain aspects, the disclosure relates to a variant ActRIIB polypeptide comprising an amino acid sequence that is at least 75%, 80%, 85%, 90%, 91%, 92%, 93%, 94%, 95%, 96%, 97%, 98%, 99%, or 100% identical to the amino acid sequence of SEQ ID NO: 342. In some embodiments, the variant ActRIIB polypeptide comprises a histidine at the position corresponding to L79 of SEQ ID NO: 2. In some embodiments, the amino acid sequence of SEQ ID NO: 342 may optionally be provided with the lysine removed from the C-terminus. The G1Fc region may also comprise a mutation to an alanine at position 234 or a mutation to an alanine at position 235, or a combination thereof.

[0124] In certain aspects, the disclosure relates to a variant ActRIIB polypeptide comprising an amino acid sequence that is at least 75%, 80%, 85%, 90%, 91%, 92%, 93%, 94%, 95%, 96%, 97%, 98%, 99%, or 100% identical to the amino acid sequence of SEQ ID NO: 344. In some embodiments, the variant ActRIIB polypeptide comprises a histidine at the position corresponding to L79 of SEQ ID NO: 2. In some embodiments, the amino acid sequence of SEQ ID NO: 344 may optionally be provided with the lysine removed from the C-terminus. The G1Fc region may also comprise a mutation to an alanine at position 234 or a mutation to an alanine at position 235, or a combination thereof.

[0125] In certain aspects, the disclosure relates to a variant ActRIIB polypeptide comprising an amino acid sequence that is at least 75%, 80%, 85%, 90%, 91%, 92%, 93%, 94%, 95%, 96%, 97%, 98%, 99%, or 100% identical to the amino acid sequence of SEQ ID NO: 348. In some embodiments, the variant ActRIIB polypeptide comprises a leucine at the position corresponding to E50 of SEQ ID NO: 2. In some embodiments, the amino acid sequence of SEQ ID NO: 348 may optionally be provided with the lysine removed from the C-terminus. The G1Fc region may also comprise a mutation to an alanine at position 234 or a mutation to an alanine at position 235, or a combination thereof.

[0126] In certain aspects, the disclosure relates to a variant ActRIIB polypeptide comprising an amino acid sequence that is at least 75%, 80%, 85%, 90%, 91%, 92%, 93%, 94%, 95%, 96%, 97%, 98%, 99%, or 100% identical to the amino acid sequence of SEQ ID NO: 350. In some embodiments, the variant ActRIIB polypeptide comprises a leucine at the position corresponding to E50 of SEQ ID NO: 2. In some embodiments, the amino acid sequence of SEQ ID NO: 350 may optionally be provided with the lysine removed from the C-terminus. The G1Fc region may also comprise a mutation to an alanine at position 234 or a mutation to an alanine at position 235, or a combination thereof.

[0127] In certain aspects, the disclosure relates to a variant ActRIIB polypeptide comprising an amino acid sequence that is at least 75%, 80%, 85%, 90%, 91%, 92%, 93%, 94%, 95%, 96%, 97%, 98%, 99%, or 100% identical to the amino acid sequence of SEQ ID NO: 354. In some embodiments, the variant ActRIIB polypeptide comprises a glycine at the position corresponding to V99 of SEQ ID NO: 2. In some embodiments, the amino acid sequence of SEQ ID NO: 354 may optionally be provided with the lysine removed from the C-terminus. The G1Fc region may also comprise a mutation to an alanine at position 234 or a mutation to an alanine at position 235, or a combination thereof.

[0128] In certain aspects, the disclosure relates to a variant ActRIIB polypeptide comprising an amino acid sequence that is at least 75%, 80%, 85%, 90%, 91%, 92%, 93%, 94%, 95%, 96%, 97%, 98%, 99%, or 100% identical to the amino acid sequence of SEQ ID NO: 356. In some embodiments, the variant ActRIIB polypeptide comprises a glycine at the position corresponding to V99 of SEQ ID NO: 2. In some embodiments, the amino acid sequence of SEQ ID NO: 356 may optionally be provided with the lysine removed from the C-terminus. The G1Fc region may also comprise a mutation to an alanine at position 234 or a mutation to an alanine at position 235, or a combination thereof.

[0129] In certain aspects, the disclosure relates to a variant ActRIIB polypeptide comprising an amino acid sequence that is at least 75%, 80%, 85%, 90%, 91%, 92%, 93%, 94%, 95%, 96%, 97%, 98%, 99%, or 100% identical to the amino acid sequence of SEQ ID NO: 366. In some embodiments, the variant ActRIIB polypeptide comprises a glutamic acid at the position corresponding to N35 of SEQ ID NO: 2. In some embodiments, the amino acid sequence of SEQ ID NO: 366 may optionally be provided with the lysine removed from the C-terminus. The G1Fc region may also comprise a mutation to an alanine at position 234 or a mutation to an alanine at position 235, or a combination thereof.

[0130] In certain aspects, the disclosure relates to a variant ActRIIB polypeptide comprising an amino acid sequence that is at least 75%, 80%, 85%, 90%, 91%, 92%, 93%, 94%, 95%, 96%, 97%, 98%, 99%, or 100% identical to the amino acid sequence of SEQ ID NO: 368. In some embodiments, the variant ActRIIB polypeptide comprises a glutamic acid at the position corresponding to N35 of SEQ ID NO: 2. In some embodiments, the amino acid sequence of SEQ ID NO: 368 may optionally be provided with the lysine removed from the C-terminus. The G1Fc region may also comprise a mutation to an alanine at position 234 or a mutation to an alanine at position 235, or a combination thereof.

[0131] In certain aspects, the disclosure relates to a variant ActRIIB polypeptide comprising an amino acid sequence that is at least 75%, 80%, 85%, 90%, 91%, 92%, 93%, 94%, 95%, 96%, 97%, 98%, 99%, or 100% identical to the amino acid sequence of SEQ ID NO: 369. In some embodiments, the variant ActRIIB polypeptide comprises an asparagine at the position corresponding to E52 of SEQ ID NO: 2. In some embodiments, the amino acid sequence of SEQ ID NO: 369 may optionally be provided with the lysine removed from the C-terminus. The G1Fc region may also comprise a mutation to an alanine at position 234 or a mutation to an alanine at position 235, or a combination thereof.

[0132] In certain aspects, the disclosure relates to a variant ActRIIB polypeptide comprising an amino acid sequence that is at least 75%, 80%, 85%, 90%, 91%, 92%, 93%, 94%, 95%, 96%, 97%, 98%, 99%, or 100% identical to the amino acid sequence of SEQ ID NO: 371. In some embodiments, the variant ActRIIB polypeptide comprises an asparagine at the position corresponding to E52 of SEQ ID NO: 2. In some embodiments, the amino acid sequence of SEQ ID NO: 371 may optionally be provided with the lysine removed from the C-terminus. The G1Fc region may also comprise a mutation to an alanine at position 234 or a mutation to an alanine at position 235, or a combination thereof.

[0133] In certain aspects, the disclosure relates to a variant ActRIIB polypeptide comprising an amino acid sequence that is at least 75%, 80%, 85%, 90%, 91%, 92%, 93%, 94%, 95%, 96%, 97%, 98%, 99%, or 100% identical to the amino acid sequence of SEQ ID NO: 372. In some embodiments, the variant ActRIIB polypeptide comprises an aspartic acid at the position corresponding to Y60 of SEQ ID NO: 2. In some embodiments, the amino acid sequence of SEQ ID NO: 372 may optionally be provided with the lysine removed from the C-terminus. The G1Fc region may also comprise a mutation to an alanine at position 234 or a mutation to an alanine at position 235, or a combination thereof.

[0134] In certain aspects, the disclosure relates to a variant ActRIIB polypeptide comprising an amino acid sequence that is at least 75%, 80%, 85%, 90%, 91%, 92%, 93%, 94%, 95%, 96%, 97%, 98%, 99%, or 100% identical to the amino acid sequence of SEQ ID NO: 374. In some embodiments, the variant ActRIIB polypeptide comprises an aspartic acid at the position corresponding to Y60 of SEQ ID NO: 2. In some embodiments, the amino acid sequence of SEQ ID NO: 374 may optionally be provided with the lysine removed from the C-terminus. The G1Fc region may also comprise a mutation to an alanine at position 234 or a mutation to an alanine at position 235, or a combination thereof.

[0135] In certain aspects, the disclosure relates to a variant ActRIIB polypeptide comprising an amino acid sequence that is at least 75%, 80%, 85%, 90%, 91%, 92%, 93%, 94%, 95%, 96%, 97%, 98%, 99%, or 100% identical to the amino acid sequence of SEQ ID NO: 375. In some embodiments, the variant ActRIIB polypeptide comprises an arginine at the position corresponding to G68 of SEQ ID NO: 2. In some embodiments, the amino acid sequence of SEQ ID NO: 375 may optionally be provided with the lysine removed from the C-terminus. The G1Fc region may also comprise a mutation to an alanine at position 234 or a mutation to an alanine at position 235, or a combination thereof.

[0136] In certain aspects, the disclosure relates to a variant ActRIIB polypeptide comprising an amino acid sequence that is at least 75%, 80%, 85%, 90%, 91%, 92%, 93%, 94%, 95%, 96%, 97%, 98%, 99%, or 100% identical to the amino acid sequence of SEQ ID NO: 377. In some embodiments, the variant ActRIIB polypeptide comprises an arginine at the position corresponding to G68 of SEQ ID NO: 2. In some embodiments, the amino acid sequence of SEQ ID NO: 377 may optionally be provided with the lysine removed from the C-terminus. The G1Fc region may also comprise a mutation to an alanine at position 234 or a mutation to an alanine at position 235, or a combination thereof.

[0137] In certain aspects, the disclosure relates to a variant ActRIIB polypeptide comprising an amino acid sequence that is at least 75%, 80%, 85%, 90%, 91%, 92%, 93%, 94%, 95%, 96%, 97%, 98%, 99%, or 100% identical to the amino acid sequence of SEQ ID NO: 378. In some embodiments, the variant ActRIIB polypeptide comprises a glutamic acid at the position corresponding to K74 of SEQ ID NO: 2. In some embodiments, the amino acid sequence of SEQ ID NO: 378 may optionally be provided with the lysine removed from the C-terminus. The G1Fc region may also comprise a mutation to an alanine at position 234 or a mutation to an alanine at position 235, or a combination thereof.

[0138] In certain aspects, the disclosure relates to a variant ActRIIB polypeptide comprising an amino acid sequence that is at least 75%, 80%, 85%, 90%, 91%, 92%, 93%, 94%, 95%, 96%, 97%, 98%, 99%, or 100% identical to the amino acid sequence of SEQ ID NO: 380. In some embodiments, the variant ActRIIB polypeptide comprises a glutamic acid at the position corresponding to K74 of SEQ ID NO: 2. In some embodiments, the amino acid sequence of SEQ ID NO: 380 may optionally be provided with the lysine removed from the C-terminus. The G1Fc region may also comprise a mutation to an alanine at position 234 or a mutation to an alanine at position 235, or a combination thereof.

[0139] In certain aspects, the disclosure relates to a variant ActRIIB polypeptide comprising an amino acid sequence that is at least 75%, 80%, 85%, 90%, 91%, 92%, 93%, 94%, 95%, 96%, 97%, 98%, 99%, or 100% identical to the amino acid sequence of SEQ ID NO: 381. In some embodiments, the variant ActRIIB polypeptide comprises a tyrosine at the position corresponding to W78 of SEQ ID NO: 2. In some embodiments, the amino acid sequence of SEQ ID NO: 381 may optionally be provided with the lysine removed from the C-terminus. The G1Fc region may also comprise a mutation to an alanine at position 234 or a mutation to an alanine at position 235, or a combination thereof.

[0140] In certain aspects, the disclosure relates to a variant ActRIIB polypeptide comprising an amino acid sequence that is at least 75%, 80%, 85%, 90%, 91%, 92%, 93%, 94%, 95%, 96%, 97%, 98%, 99%, or 100% identical to the amino acid sequence of SEQ ID NO: 383. In some embodiments, the variant ActRIIB polypeptide comprises a tyrosine at the position corresponding to W78 of SEQ ID NO: 2. In some embodiments, the amino acid sequence of SEQ ID NO: 383 may optionally be provided with the lysine removed from the C-terminus. The G1Fc region may also comprise a mutation to an alanine at position 234 or a mutation to an alanine at position 235, or a combination thereof.

[0141] In certain aspects, the disclosure relates to a variant ActRIIB polypeptide comprising an amino acid sequence that is at least 75%, 80%, 85%, 90%, 91%, 92%, 93%, 94%, 95%, 96%, 97%, 98%, 99%, or 100% identical to the amino acid sequence of SEQ ID NO: 384. In some embodiments, the variant ActRIIB polypeptide comprises an alanine at the position corresponding to L79 of SEQ ID NO: 2. In some embodiments, the amino acid sequence of SEQ ID NO: 384 may optionally be provided with the lysine removed from the C-terminus. The G1Fc region may also comprise a mutation to an alanine at position 234 or a mutation to an alanine at position 235, or a combination thereof.

[0142] In certain aspects, the disclosure relates to a variant ActRIIB polypeptide comprising an amino acid sequence that is at least 75%, 80%, 85%, 90%, 91%, 92%, 93%, 94%, 95%, 96%, 97%, 98%, 99%, or 100% identical to the amino acid sequence of SEQ ID NO: 386. In some embodiments, the variant ActRIIB polypeptide comprises an alanine at the position corresponding to L79 of SEQ ID NO: 2. In some embodiments, the amino acid sequence of SEQ ID NO: 386 may optionally be provided with the lysine removed from the C-terminus. The G1Fc region may also comprise a mutation to an alanine at position 234 or a mutation to an alanine at position 235, or a combination thereof.

[0143] In certain aspects, the disclosure relates to a variant ActRIIB polypeptide comprising an amino acid sequence that is at least 75%, 80%, 85%, 90%, 91%, 92%, 93%, 94%, 95%, 96%, 97%, 98%, 99%, or 100% identical to the amino acid sequence of SEQ ID NO: 387. In some embodiments, the variant ActRIIB polypeptide comprises a lysine at the position corresponding to L79 of SEQ ID NO: 2. In some embodiments, the amino acid sequence of SEQ ID NO: 387 may optionally be provided with the lysine removed from the C-terminus. The G1Fc region may also comprise a mutation to an alanine at position 234 or a mutation to an alanine at position 235, or a combination thereof.

[0144] In certain aspects, the disclosure relates to a variant ActRIIB polypeptide comprising an amino acid sequence that is at least 75%, 80%, 85%, 90%, 91%, 92%, 93%, 94%, 95%, 96%, 97%, 98%, 99%, or 100% identical to the amino acid sequence of SEQ ID NO: 389. In some embodiments, the variant ActRIIB polypeptide comprises a lysine at the position corresponding to L79 of SEQ ID NO: 2. In some embodiments, the amino acid sequence of SEQ ID NO: 389 may optionally be provided with the lysine removed from the C-terminus. The G1Fc region may also comprise a mutation to an alanine at position 234 or a mutation to an alanine at position 235, or a combination thereof.

[0145] In certain aspects, the disclosure relates to a variant ActRIIB polypeptide comprising an amino acid sequence that is at least 75%, 80%, 85%, 90%, 91%, 92%, 93%, 94%, 95%, 96%, 97%, 98%, 99%, or 100% identical to the amino acid sequence of SEQ ID NO: 390. In some embodiments, the variant ActRIIB polypeptide comprises a serine at the position corresponding to L79 of SEQ ID NO: 2. In some embodiments, the amino acid sequence of SEQ ID NO: 390 may optionally be provided with the lysine removed from the C-terminus. The G1Fc region may also comprise a mutation to an alanine at position 234 or a mutation to an alanine at position 235, or a combination thereof.

[0146] In certain aspects, the disclosure relates to a variant ActRIIB polypeptide comprising an amino acid sequence that is at least 75%, 80%, 85%, 90%, 91%, 92%, 93%, 94%, 95%, 96%, 97%, 98%, 99%, or 100% identical to the amino acid sequence of SEQ ID NO: 392. In some embodiments, the variant ActRIIB polypeptide comprises a serine at the position corresponding to L79 of SEQ ID NO: 2. In some embodiments, the amino acid sequence of SEQ ID NO: 392 may optionally be provided with the lysine removed from the C-terminus. The G1Fc region may also comprise a mutation to an alanine at position 234 or a mutation to an alanine at position 235, or a combination thereof.

[0147] In certain aspects, the disclosure relates to a variant ActRIIB polypeptide comprising an amino acid sequence that is at least 75%, 80%, 85%, 90%, 91%, 92%, 93%, 94%, 95%, 96%, 97%, 98%, 99%, or 100% identical to the amino acid sequence of SEQ ID NO: 393. In some embodiments, the variant ActRIIB polypeptide comprises a tryptophan at the position corresponding to L79 of SEQ ID NO: 2. In some embodiments, the amino acid sequence of SEQ ID NO: 393 may optionally be provided with the lysine removed from the C-terminus. The G1Fc region may also comprise a mutation to an alanine at position 234 or a mutation to an alanine at position 235, or a combination thereof.

[0148] In certain aspects, the disclosure relates to a variant ActRIIB polypeptide comprising an amino acid sequence that is at least 75%, 80%, 85%, 90%, 91%, 92%, 93%, 94%, 95%, 96%, 97%, 98%, 99%, or 100% identical to the amino acid sequence of SEQ ID NO: 395. In some embodiments, the variant ActRIIB polypeptide comprises a tryptophan at the position corresponding to L79 of SEQ ID NO: 2. In some embodiments, the amino acid sequence of SEQ ID NO: 395 may optionally be provided with the lysine removed from the C-terminus. The G1Fc region may also comprise a mutation to an alanine at position 234 or a mutation to an alanine at position 235, or a combination thereof.

[0149] In certain aspects, the disclosure relates to a variant ActRIIB polypeptide comprising an amino acid sequence that is at least 75%, 80%, 85%, 90%, 91%, 92%, 93%, 94%, 95%, 96%, 97%, 98%, 99%, or 100% identical to the amino acid sequence of SEQ ID NO: 396. In some embodiments, the variant ActRIIB polypeptide comprises an aspartic acid at the position corresponding to F82 of SEQ ID NO: 2. In some embodiments, the amino acid sequence of SEQ ID NO: 396 may optionally be provided with the lysine removed from the C-terminus. The G1Fc region may also comprise a mutation to an alanine at position 234 or a mutation to an alanine at position 235, or a combination thereof.

[0150] In certain aspects, the disclosure relates to a variant ActRIIB polypeptide comprising an amino acid sequence that is at least 75%, 80%, 85%, 90%, 91%, 92%, 93%, 94%, 95%, 96%, 97%, 98%, 99%, or 100% identical to the amino acid sequence of SEQ ID NO: 398. In some embodiments, the variant ActRIIB polypeptide comprises an aspartic acid at the position corresponding to F82 of SEQ ID NO: 2. In some embodiments, the amino acid sequence of SEQ ID NO: 398 may optionally be provided with the lysine removed from the C-terminus. The G1Fc region may also comprise a mutation to an alanine at position 234 or a mutation to an alanine at position 235, or a combination thereof.

[0151] In certain aspects, the disclosure relates to a variant ActRIIB polypeptide comprising an amino acid sequence that is at least 75%, 80%, 85%, 90%, 91%, 92%, 93%, 94%, 95%, 96%, 97%, 98%, 99%, or 100% identical to the amino acid sequence of SEQ ID NO: 399. In some embodiments, the variant ActRIIB polypeptide comprises a glutamic acid at the position corresponding to F82 of SEQ ID NO: 2. In some embodiments, the amino acid sequence of SEQ ID NO: 399 may optionally be provided with the lysine removed from the C-terminus. The G1Fc region may also comprise a mutation to an alanine at position 234 or a mutation to an alanine at position 235, or a combination thereof.

[0152] In certain aspects, the disclosure relates to a variant ActRIIB polypeptide comprising an amino acid sequence that is at least 75%, 80%, 85%, 90%, 91%, 92%, 93%, 94%, 95%, 96%, 97%, 98%, 99%, or 100% identical to the amino acid sequence of SEQ ID NO: 401. In some embodiments, the variant ActRIIB polypeptide comprises a glutamic acid at the position corresponding to F82 of SEQ ID NO: 2. In some embodiments, the amino acid sequence of SEQ ID NO: 401 may optionally be provided with the lysine removed from the C-terminus. The G1Fc region may also comprise a mutation to an alanine at position 234 or a mutation to an alanine at position 235, or a combination thereof.

[0153] In certain aspects, the disclosure relates to a variant ActRIIB polypeptide comprising an amino acid sequence that is at least 75%, 80%, 85%, 90%, 91%, 92%, 93%, 94%, 95%, 96%, 97%, 98%, 99%, or 100% identical to the amino acid sequence of SEQ ID NO: 402. In some embodiments, the variant ActRIIB polypeptide comprises a leucine at the position corresponding to F82 of SEQ ID NO: 2. In some embodiments, the amino acid sequence of SEQ ID NO: 402 may optionally be provided with the lysine removed from the C-terminus. The G1Fc region may also comprise a mutation to an alanine at position 234 or a mutation to an alanine at position 235, or a combination thereof.

[0154] In certain aspects, the disclosure relates to a variant ActRIIB polypeptide comprising an amino acid sequence that is at least 75%, 80%, 85%, 90%, 91%, 92%, 93%, 94%, 95%, 96%, 97%, 98%, 99%, or 100% identical to the amino acid sequence of SEQ ID NO: 404. In some embodiments, the variant ActRIIB polypeptide comprises an leucine at the position corresponding to F82 of SEQ ID NO: 2. In some embodiments, the amino acid sequence of SEQ ID NO: 404 may optionally be provided with the lysine removed from the C-terminus. The G1Fc region may also comprise a mutation to an alanine at position 234 or a mutation to an alanine at position 235, or a combination thereof.

[0155] In certain aspects, the disclosure relates to a variant ActRIIB polypeptide comprising an amino acid sequence that is at least 75%, 80%, 85%, 90%, 91%, 92%, 93%, 94%, 95%, 96%, 97%, 98%, 99%, or 100% identical to the amino acid sequence of SEQ ID NO: 405. In some embodiments, the variant ActRIIB polypeptide comprises a serine at the position corresponding to F82 of SEQ ID NO: 2. In some embodiments, the amino acid sequence of SEQ ID NO: 405 may optionally be provided with the lysine removed from the C-terminus. The G1Fc region may also comprise a mutation to an alanine at position 234 or a mutation to an alanine at position 235, or a combination thereof.

[0156] In certain aspects, the disclosure relates to a variant ActRIIB polypeptide comprising an amino acid sequence that is at least 75%, 80%, 85%, 90%, 91%, 92%, 93%, 94%, 95%, 96%, 97%, 98%, 99%, or 100% identical to the amino acid sequence of SEQ ID NO: 407. In some embodiments, the variant ActRIIB polypeptide comprises a serine at the position corresponding to F82 of SEQ ID NO: 2. In some embodiments, the amino acid sequence of SEQ ID NO: 407 may optionally be provided with the lysine removed from the C-terminus. The G1Fc region may also comprise a mutation to an alanine at position 234 or a mutation to an alanine at position 235, or a combination thereof.

[0157] In certain aspects, the disclosure relates to a variant ActRIIB polypeptide comprising an amino acid sequence that is at least 75%, 80%, 85%, 90%, 91%, 92%, 93%, 94%, 95%, 96%, 97%, 98%, 99%, or 100% identical to the amino acid sequence of SEQ ID NO: 408. In some embodiments, the variant ActRIIB polypeptide comprises a tyrosine at the position corresponding to F82 of SEQ ID NO: 2. In some embodiments, the amino acid sequence of SEQ ID NO: 408 may optionally be provided with the lysine removed from the C-terminus. The G1Fc region may also comprise a mutation to an alanine at position 234 or a mutation to an alanine at position 235, or a combination thereof.

[0158] In certain aspects, the disclosure relates to a variant ActRIIB polypeptide comprising an amino acid sequence that is at least 75%, 80%, 85%, 90%, 91%, 92%, 93%, 94%, 95%, 96%, 97%, 98%, 99%, or 100% identical to the amino acid sequence of SEQ ID NO: 410. In some embodiments, the variant ActRIIB polypeptide comprises a tyrosine at the position corresponding to F82 of SEQ ID NO: 2. In some embodiments, the amino acid sequence of SEQ ID NO: 410 may optionally be provided with the lysine removed from the C-terminus. The G1Fc region may also comprise a mutation to an alanine at position 234 or a mutation to an alanine at position 235, or a combination thereof.

[0159] In certain aspects, the disclosure relates to a variant ActRIIB polypeptide comprising an amino acid sequence that is at least 75%, 80%, 85%, 90%, 91%, 92%, 93%, 94%, 95%, 96%, 97%, 98%, 99%, or 100% identical to the amino acid sequence of SEQ ID NO: 411. In some embodiments, the variant ActRIIB polypeptide comprises a lysine at the position corresponding to E94 of SEQ ID NO: 2. In some embodiments, the amino acid sequence of SEQ ID NO: 411 may optionally be provided with the lysine removed from the C-terminus. The G1Fc region may also comprise a mutation to an alanine at position 234 or a mutation to an alanine at position 235, or a combination thereof.

[0160] In certain aspects, the disclosure relates to a variant ActRIIB polypeptide comprising an amino acid sequence that is at least 75%, 80%, 85%, 90%, 91%, 92%, 93%, 94%, 95%, 96%, 97%, 98%, 99%, or 100% identical to the amino acid sequence of SEQ ID NO: 413. In some embodiments, the variant ActRIIB polypeptide comprises a lysine at the position corresponding to E94 of SEQ ID NO: 2. In some embodiments, the amino acid sequence of SEQ ID NO: 413 may optionally be provided with the lysine removed from the C-terminus. The G1Fc region may also comprise a mutation to an alanine at position 234 or a mutation to an alanine at position 235, or a combination thereof.

[0161] In certain aspects, the disclosure relates to a variant ActRIIB polypeptide comprising an amino acid sequence that is at least 75%, 80%, 85%, 90%, 91%, 92%, 93%, 94%, 95%, 96%, 97%, 98%, 99%, or 100% identical to the amino acid sequence of SEQ ID NO: 522. In some embodiments, the variant ActRIIB polypeptide comprises a lysine at the position corresponding to F82 of SEQ ID NO: 2. In some embodiments, the amino acid sequence of SEQ ID NO: 522 may optionally be provided with the lysine removed from the C-terminus.

[0162] In certain aspects, the disclosure relates to a variant ActRIIB polypeptide comprising an amino acid sequence that is at least 75%, 80%, 85%, 90%, 91%, 92%, 93%, 94%, 95%, 96%, 97%, 98%, 99%, or 100% identical to the amino acid sequence of SEQ ID NO: 524. In some embodiments, the variant ActRIIB polypeptide comprises a lysine at the position corresponding to F82 of SEQ ID NO: 2. In some embodiments, the amino acid sequence of SEQ ID NO: 524 may optionally be provided with the lysine removed from the C-terminus.

[0163] In some embodiments, any of the variant ActRIIB polypeptides disclosed herein comprises at least 2, 3, 4, 5, 6, 7, 8, 9, or 10 of any of the amino acid substitutions disclosed herein. In some embodiments, any of the variant ActRIIB polypeptides disclosed herein comprises 2 of any of the amino acid substitutions disclosed herein. In some embodiments, any of the variant ActRIIB polypeptides disclosed herein comprises 3 of any of the amino acid substitutions disclosed herein. In some embodiments, any of the variant ActRIIB polypeptides disclosed herein comprises 4 of any of the amino acid substitutions disclosed herein. In some embodiments, any of the variant ActRIIB polypeptides disclosed herein comprises 5 of any of the amino acid substitutions disclosed herein. In some embodiments, any of the variant ActRIIB polypeptides disclosed herein comprises 6 of any of the amino acid substitutions disclosed herein. In some embodiments, any of the variant ActRIIB polypeptides disclosed herein comprises 7 of any of the amino acid substitutions disclosed herein. In some embodiments, any of the variant ActRIIB polypeptides disclosed herein comprises 8 of any of the amino acid substitutions disclosed herein. In some embodiments, any of the variant ActRIIB polypeptides disclosed herein comprises 9 of any of the amino acid substitutions disclosed herein. In some embodiments, any of the variant ActRIIB polypeptides disclosed herein comprises 10 of any of the amino acid substitutions disclosed herein.

[0164] In certain aspects, the disclosure relates to a variant ActRIIB polypeptide comprising two or more amino acid substitutions as compared to the reference amino acid sequence of SEQ ID NO: 2. For example, in some embodiments, the variant ActRIIB polypeptide comprises an A24N substitution and a K74A substitution. In some embodiments, the variant ActRIIB polypeptide comprises a L79P substitution and a K74A substitution. In some embodiments, the variant ActRIIB polypeptide comprises a P129S substitution and a P130A substitution. In some embodiments, the variant ActRIIB polypeptide comprises a L38N substitution and a L79R substitution. In some embodiments, the variant ActRIIB polypeptide comprises a F82I substitution and a N83R substitution. In some embodiments, the variant ActRIIB polypeptide comprises a F82K substitution and a N83R substitution. In some embodiments, the variant ActRIIB polypeptide comprises a F82T substitution and a N83R substitution. In some embodiments, the variant ActRIIB polypeptide comprises a L79H substitution and a F82K substitution. In some embodiments, the variant ActRIIB polypeptide comprises a L79H substitution and a F82I substitution. In some embodiments, the variant ActRIIB polypeptide comprises a F82D substitution and a N83R substitution. In some embodiments, the variant ActRIIB polypeptide comprises a F82E substitution and a N83R substitution. In some embodiments, the variant ActRIIB polypeptide comprises a L79F substitution and a F82D substitution. In some embodiments, the variant ActRIIB polypeptide comprises a L79F substitution and a F82T substitution. In some embodiments, the variant ActRIIB polypeptide comprises a E52D substitution and a F82D substitution. In some embodiments, the variant ActRIIB polypeptide comprises an E52D substitution and a F82T substitution. In some embodiments, the variant ActRIIB polypeptide comprises a L57R substitution and a F82D substitution. In some embodiments, the variant ActRIIB polypeptide comprises a L57R substitution and a F82T substitution. In some embodiments, the variant ActRIIB polypeptide comprises a F82I substitution and an E94K substitution. In some embodiments, the variant ActRIIB polypeptide comprises a F82S substitution and a N83R substitution. In some embodiments, the variant ActRIIB polypeptide comprises a L57R substitution and a F82S substitution. In some embodiments, the variant ActRIIB polypeptide comprises a K74A substitution and a L79P substitution. In some embodiments, the variant ActRIIB polypeptide comprises a K55A substitution and a F82I substitution. In some embodiments, the variant ActRIIB polypeptide comprises a L79K substitution and a F82K substitution. In some embodiments, the variant ActRIIB polypeptide comprises a F82W substitution and a N83A substitution.

[0165] In certain aspects, the disclosure relates to a variant ActRIIB polypeptide comprising an amino acid sequence that is at least 75%, 80%, 85%, 90%, 91%, 92%, 93%, 94%, 95%, 96%, 97%, 98%, 99%, or 100% identical to the amino acid sequence of SEQ ID NO: 276. In some embodiments, the variant ActRIIB polypeptide comprises an isoleucine at the position corresponding to F82 of SEQ ID NO: 2. In some embodiments, the variant ActRIIB polypeptide comprises an arginine at the position corresponding to N83 of SEQ ID NO: 2. In some embodiments, the variant ActRIIB polypeptide comprises an isoleucine at the position corresponding to F82 of SEQ ID NO: 2 and an arginine at the position corresponding to N83 of SEQ ID NO: 2. In some embodiments, the amino acid sequence of SEQ ID NO: 276 may optionally be provided with the lysine removed from the C-terminus. The G1Fc region may also comprise a mutation to an alanine at position 234 or a mutation to an alanine at position 235, or a combination thereof.

[0166] In certain aspects, the disclosure relates to a variant ActRIIB polypeptide comprising an amino acid sequence that is at least 75%, 80%, 85%, 90%, 91%, 92%, 93%, 94%, 95%, 96%, 97%, 98%, 99%, or 100% identical to the amino acid sequence of SEQ ID NO: 278. In some embodiments, the variant ActRIIB polypeptide comprises an isoleucine at the position corresponding to F82 of SEQ ID NO: 2. In some embodiments, the variant ActRIIB polypeptide comprises an arginine at the position corresponding to N83 of SEQ ID NO: 2. In some embodiments, the variant ActRIIB polypeptide comprises an isoleucine at the position corresponding to F82 of SEQ ID NO: 2 and an arginine at the position corresponding to N83 of SEQ ID NO: 2. In some embodiments, the amino acid sequence of SEQ ID NO: 278 may optionally be provided with the lysine removed from the C-terminus. The G1Fc region may also comprise a mutation to an alanine at position 234 or a mutation to an alanine at position 235, or a combination thereof.

[0167] In certain aspects, the disclosure relates to a variant ActRIIB polypeptide comprising an amino acid sequence that is at least 75%, 80%, 85%, 90%, 91%, 92%, 93%, 94%, 95%, 96%, 97%, 98%, 99%, or 100% identical to the amino acid sequence of SEQ ID NO: 279. In some embodiments, the variant ActRIIB polypeptide comprises an lysine at the position corresponding to F82 of SEQ ID NO: 2. In some embodiments, the variant ActRIIB polypeptide comprises an arginine at the position corresponding to N83 of SEQ ID NO: 2. In some embodiments, the variant ActRIIB polypeptide comprises a lysine at the position corresponding to F82 of SEQ ID NO: 2 and an arginine at the position corresponding to N83 of SEQ ID NO: 2. In some embodiments, the amino acid sequence of SEQ ID NO: 279 may optionally be provided with the lysine removed from the C-terminus. The G1Fc region may also comprise a mutation to an alanine at position 234 or a mutation to an alanine at position 235, or a combination thereof.

[0168] In certain aspects, the disclosure relates to a variant ActRIIB polypeptide comprising an amino acid sequence that is at least 75%, 80%, 85%, 90%, 91%, 92%, 93%, 94%, 95%, 96%, 97%, 98%, 99%, or 100% identical to the amino acid sequence of SEQ ID NO: 332. In some embodiments, the variant ActRIIB polypeptide comprises an lysine at the position corresponding to F82 of SEQ ID NO: 2. In some embodiments, the variant ActRIIB polypeptide comprises an arginine at the position corresponding to N83 of SEQ ID NO: 2. In some embodiments, the variant ActRIIB polypeptide comprises a lysine at the position corresponding to F82 of SEQ ID NO: 2 and an arginine at the position corresponding to N83 of SEQ ID NO: 2. In some embodiments, the amino acid sequence of SEQ ID NO: 332 may optionally be provided with the lysine removed from the C-terminus. The G1Fc region may also comprise a mutation to an alanine at position 234 or a mutation to an alanine at position 235, or a combination thereof.

[0169] In certain aspects, the disclosure relates to a variant ActRIIB polypeptide comprising an amino acid sequence that is at least 75%, 80%, 85%, 90%, 91%, 92%, 93%, 94%, 95%, 96%, 97%, 98%, 99%, or 100% identical to the amino acid sequence of SEQ ID NO: 333. In some embodiments, the variant ActRIIB polypeptide comprises a threonine at the position corresponding to F82 of SEQ ID NO: 2. In some embodiments, the variant ActRIIB polypeptide comprises an arginine at the position corresponding to N83 of SEQ ID NO: 2. In some embodiments, the variant ActRIIB polypeptide comprises a threonine at the position corresponding to F82 of SEQ ID NO: 2 and an arginine at the position corresponding to N83 of SEQ ID NO: 2. In some embodiments, the amino acid sequence of SEQ ID NO: 333 may optionally be provided with the lysine removed from the C-terminus. The G1Fc region may also comprise a mutation to an alanine at position 234 or a mutation to an alanine at position 235, or a combination thereof.

[0170] In certain aspects, the disclosure relates to a variant ActRIIB polypeptide comprising an amino acid sequence that is at least 75%, 80%, 85%, 90%, 91%, 92%, 93%, 94%, 95%, 96%, 97%, 98%, 99%, or 100% identical to the amino acid sequence of SEQ ID NO: 335. In some embodiments, the variant ActRIIB polypeptide comprises a threonine at the position corresponding to F82 of SEQ ID NO: 2. In some embodiments, the variant ActRIIB polypeptide comprises an arginine at the position corresponding to N83 of SEQ ID NO: 2. In some embodiments, the variant ActRIIB polypeptide comprises a threonine at the position corresponding to F82 of SEQ ID NO: 2 and an arginine at the position corresponding to N83 of SEQ ID NO: 2. In some embodiments, the amino acid sequence of SEQ ID NO: 335 may optionally be provided with the lysine removed from the C-terminus. The G1Fc region may also comprise a mutation to an alanine at position 234 or a mutation to an alanine at position 235, or a combination thereof.

[0171] In certain aspects, the disclosure relates to a variant ActRIIB polypeptide comprising an amino acid sequence that is at least 75%, 80%, 85%, 90%, 91%, 92%, 93%, 94%, 95%, 96%, 97%, 98%, 99%, or 100% identical to the amino acid sequence of SEQ ID NO: 339. In some embodiments, the variant ActRIIB polypeptide comprises a histidine at the position corresponding to L79 of SEQ ID NO: 2. In some embodiments, the variant ActRIIB polypeptide comprises an isoleucine at the position corresponding to F82 of SEQ ID NO: 2. In some embodiments, the variant ActRIIB polypeptide comprises a histidine at the position corresponding to L79 of SEQ ID NO: 2 and an isoleucine at the position corresponding to F82 of SEQ ID NO: 2. In some embodiments, the amino acid sequence of SEQ ID NO: 339 may optionally be provided with the lysine removed from the C-terminus. The G1Fc region may also comprise a mutation to an alanine at position 234 or a mutation to an alanine at position 235, or a combination thereof.

[0172] In certain aspects, the disclosure relates to a variant ActRIIB polypeptide comprising an amino acid sequence that is at least 75%, 80%, 85%, 90%, 91%, 92%, 93%, 94%, 95%, 96%, 97%, 98%, 99%, or 100% identical to the amino acid sequence of SEQ ID NO: 341. In some embodiments, the variant ActRIIB polypeptide comprises a histidine at the position corresponding to L79 of SEQ ID NO: 2. In some embodiments, the variant ActRIIB polypeptide comprises an isoleucine at the position corresponding to F82 of SEQ ID NO: 2. In some embodiments, the variant ActRIIB polypeptide comprises a histidine at the position corresponding to L79 of SEQ ID NO: 2 and an isoleucine at the position corresponding to F82 of SEQ ID NO: 2. In some embodiments, the amino acid sequence of SEQ ID NO: 341 may optionally be provided with the lysine removed from the C-terminus. The G1Fc region may also comprise a mutation to an alanine at position 234 or a mutation to an alanine at position 235, or a combination thereof.

[0173] In certain aspects, the disclosure relates to a variant ActRIIB polypeptide comprising an amino acid sequence that is at least 75%, 80%, 85%, 90%, 91%, 92%, 93%, 94%, 95%, 96%, 97%, 98%, 99%, or 100% identical to the amino acid sequence of SEQ ID NO: 345. In some embodiments, the variant ActRIIB polypeptide comprises a histidine at the position corresponding to L79 of SEQ ID NO: 2. In some embodiments, the variant ActRIIB polypeptide comprises a lysine at the position corresponding to F82 of SEQ ID NO: 2. In some embodiments, the variant ActRIIB polypeptide comprises a histidine at the position corresponding to L79 of SEQ ID NO: 2, and a lysine at the position corresponding to F82 of SEQ ID NO: 2. In some embodiments, the amino acid sequence of SEQ ID NO: 345 may optionally be provided with the lysine removed from the C-terminus. The G1Fc region may also comprise a mutation to an alanine at position 234 or a mutation to an alanine at position 235, or a combination thereof.

[0174] In certain aspects, the disclosure relates to a variant ActRIIB polypeptide comprising an amino acid sequence that is at least 75%, 80%, 85%, 90%, 91%, 92%, 93%, 94%, 95%, 96%, 97%, 98%, 99%, or 100% identical to the amino acid sequence of SEQ ID NO: 347. In some embodiments, the variant ActRIIB polypeptide comprises a histidine at the position corresponding to L79 of SEQ ID NO: 2. In some embodiments, the variant ActRIIB polypeptide comprises a lysine at the position corresponding to F82 of SEQ ID NO: 2. In some embodiments, the variant ActRIIB polypeptide comprises a histidine at the position corresponding to L79 of SEQ ID NO: 2, and a lysine at the position corresponding to F82 of SEQ ID NO: 2. In some embodiments, the amino acid sequence of SEQ ID NO: 347 may optionally be provided with the lysine removed from the C-terminus. The G1Fc region may also comprise a mutation to an alanine at position 234 or a mutation to an alanine at position 235, or a combination thereof.

[0175] In certain aspects, the disclosure relates to a variant ActRIIB polypeptide comprising an amino acid sequence that is at least 75%, 80%, 85%, 90%, 91%, 92%, 93%, 94%, 95%, 96%, 97%, 98%, 99%, or 100% identical to the amino acid sequence of SEQ ID NO: 351. In some embodiments, the variant ActRIIB polypeptide comprises an asparagine at the position corresponding to L38 of SEQ ID NO: 2. In some embodiments, the variant ActRIIB polypeptide comprises an arginine at the position corresponding to L79 of SEQ ID NO: 2. In some embodiments, the variant ActRIIB polypeptide comprises an asparagine at the position corresponding to L38 of SEQ ID NO: 2, and an arginine at the position corresponding to L79 of SEQ ID NO: 2. In some embodiments, the amino acid sequence of SEQ ID NO: 351 may optionally be provided with the lysine removed from the C-terminus. The G1Fc region may also comprise a mutation to an alanine at position 234 or a mutation to an alanine at position 235, or a combination thereof.

[0176] In certain aspects, the disclosure relates to a variant ActRIIB polypeptide comprising an amino acid sequence that is at least 75%, 80%, 85%, 90%, 91%, 92%, 93%, 94%, 95%, 96%, 97%, 98%, 99%, or 100% identical to the amino acid sequence of SEQ ID NO: 353. In some embodiments, the variant ActRIIB polypeptide comprises an asparagine at the position corresponding to L38 of SEQ ID NO: 2. In some embodiments, the variant ActRIIB polypeptide comprises an arginine at the position corresponding to L79 of SEQ ID NO: 2. In some embodiments, the variant ActRIIB polypeptide comprises an asparagine at the position corresponding to L38 of SEQ ID NO: 2, and an arginine at the position corresponding to L79 of SEQ ID NO: 2. In some embodiments, the amino acid sequence of SEQ ID NO: 353 may optionally be provided with the lysine removed from the C-terminus. The G1Fc region may also comprise a mutation to an alanine at position 234 or a mutation to an alanine at position 235, or a combination thereof.

[0177] In certain aspects, the disclosure relates to a variant ActRIIB polypeptide comprising an amino acid sequence that is at least 75%, 80%, 85%, 90%, 91%, 92%, 93%, 94%, 95%, 96%, 97%, 98%, 99%, or 100% identical to the amino acid sequence of SEQ ID NO: 414. In some embodiments, the variant ActRIIB polypeptide comprises an aspartic acid at the position corresponding to E52 of SEQ ID NO: 2. In some embodiments, the variant ActRIIB polypeptide comprises an aspartic acid at the position corresponding to F82 of SEQ ID NO: 2. In some embodiments, the variant ActRIIB polypeptide comprises an aspartic acid at the position corresponding to E52 of SEQ ID NO: 2 and an aspartic acid at the position corresponding to F82 of SEQ ID NO: 2. In some embodiments, the amino acid sequence of SEQ ID NO: 414 may optionally be provided with the lysine removed from the C-terminus. The G1Fc region may also comprise a mutation to an alanine at position 234 or a mutation to an alanine at position 235, or a combination thereof.

[0178] In certain aspects, the disclosure relates to a variant ActRIIB polypeptide comprising an amino acid sequence that is at least 75%, 80%, 85%, 90%, 91%, 92%, 93%, 94%, 95%, 96%, 97%, 98%, 99%, or 100% identical to the amino acid sequence of SEQ ID NO: 416. In some embodiments, the variant ActRIIB polypeptide comprises an aspartic acid at the position corresponding to E52 of SEQ ID NO: 2. In some embodiments, the variant ActRIIB polypeptide comprises an aspartic acid at the position corresponding to F82 of SEQ ID NO: 2. In some embodiments, the variant ActRIIB polypeptide comprises an aspartic acid at the position corresponding to E52 of SEQ ID NO: 2 and an aspartic acid at the position corresponding to F82 of SEQ ID NO: 2. In some embodiments, the amino acid sequence of SEQ ID NO: 416 may optionally be provided with the lysine removed from the C-terminus. The G1Fc region may also comprise a mutation to an alanine at position 234 or a mutation to an alanine at position 235, or a combination thereof.

[0179] In certain aspects, the disclosure relates to a variant ActRIIB polypeptide comprising an amino acid sequence that is at least 75%, 80%, 85%, 90%, 91%, 92%, 93%, 94%, 95%, 96%, 97%, 98%, 99%, or 100% identical to the amino acid sequence of SEQ ID NO: 417. In some embodiments, the variant ActRIIB polypeptide comprises an aspartic acid at the position corresponding to E52 of SEQ ID NO: 2. In some embodiments, the variant ActRIIB polypeptide comprises a threonine at the position corresponding to F82 of SEQ ID NO: 2. In some embodiments, the variant ActRIIB polypeptide comprises an aspartic acid at the position corresponding to E52 of SEQ ID NO: 2 and a threonine at the position corresponding to F82 of SEQ ID NO: 2. In some embodiments, the amino acid sequence of SEQ ID NO: 417 may optionally be provided with the lysine removed from the C-terminus. The G1Fc region may also comprise a mutation to an alanine at position 234 or a mutation to an alanine at position 235, or a combination thereof.

[0180] In certain aspects, the disclosure relates to a variant ActRIIB polypeptide comprising an amino acid sequence that is at least 75%, 80%, 85%, 90%, 91%, 92%, 93%, 94%, 95%, 96%, 97%, 98%, 99%, or 100% identical to the amino acid sequence of SEQ ID NO: 419. In some embodiments, the variant ActRIIB polypeptide comprises an aspartic acid at the position corresponding to E52 of SEQ ID NO: 2. In some embodiments, the variant ActRIIB polypeptide comprises a threonine at the position corresponding to F82 of SEQ ID NO: 2. In some embodiments, the variant ActRIIB polypeptide comprises an aspartic acid at the position corresponding to E52 of SEQ ID NO: 2 and a threonine at the position corresponding to F82 of SEQ ID NO: 2. In some embodiments, the amino acid sequence of SEQ ID NO: 419 may optionally be provided with the lysine removed from the C-terminus. The G1Fc region may also comprise a mutation to an alanine at position 234 or a mutation to an alanine at position 235, or a combination thereof.

[0181] In certain aspects, the disclosure relates to a variant ActRIIB polypeptide comprising an amino acid sequence that is at least 75%, 80%, 85%, 90%, 91%, 92%, 93%, 94%, 95%, 96%, 97%, 98%, 99%, or 100% identical to the amino acid sequence of SEQ ID NO: 420. In some embodiments, the variant ActRIIB polypeptide comprises an arginine at the position corresponding to L57 of SEQ ID NO: 2. In some embodiments, the variant ActRIIB polypeptide comprises an aspartic acid at the position corresponding to F82 of SEQ ID NO: 2. In some embodiments, the variant ActRIIB polypeptide comprises an arginine at the position corresponding to L57 of SEQ ID NO: 2 and an aspartic acid at the position corresponding to F82 of SEQ ID NO: 2. In some embodiments, the amino acid sequence of SEQ ID NO: 420 may optionally be provided with the lysine removed from the C-terminus. The G1Fc region may also comprise a mutation to an alanine at position 234 or a mutation to an alanine at position 235, or a combination thereof.

[0182] In certain aspects, the disclosure relates to a variant ActRIIB polypeptide comprising an amino acid sequence that is at least 75%, 80%, 85%, 90%, 91%, 92%, 93%, 94%, 95%, 96%, 97%, 98%, 99%, or 100% identical to the amino acid sequence of SEQ ID NO: 422. In some embodiments, the variant ActRIIB polypeptide comprises an arginine at the position corresponding to L57 of SEQ ID NO: 2. In some embodiments, the variant ActRIIB polypeptide comprises an aspartic acid at the position corresponding to F82 of SEQ ID NO: 2. In some embodiments, the variant ActRIIB polypeptide comprises an arginine at the position corresponding to L57 of SEQ ID NO: 2 and an aspartic acid at the position corresponding to F82 of SEQ ID NO: 2. In some embodiments, the amino acid sequence of SEQ ID NO: 422 may optionally be provided with the lysine removed from the C-terminus. The G1Fc region may also comprise a mutation to an alanine at position 234 or a mutation to an alanine at position 235, or a combination thereof.

[0183] In certain aspects, the disclosure relates to a variant ActRIIB polypeptide comprising an amino acid sequence that is at least 75%, 80%, 85%, 90%, 91%, 92%, 93%, 94%, 95%, 96%, 97%, 98%, 99%, or 100% identical to the amino acid sequence of SEQ ID NO: 423. In some embodiments, the variant ActRIIB polypeptide comprises an arginine at the position corresponding to L57 of SEQ ID NO: 2. In some embodiments, the variant ActRIIB polypeptide comprises a serine at the position corresponding to F82 of SEQ ID NO: 2. In some embodiments, the variant ActRIIB polypeptide comprises an arginine at the position corresponding to L57 of SEQ ID NO: 2 and a serine at the position corresponding to F82 of SEQ ID NO: 2. In some embodiments, the amino acid sequence of SEQ ID NO: 423 may optionally be provided with the lysine removed from the C-terminus. The G1Fc region may also comprise a mutation to an alanine at position 234 or a mutation to an alanine at position 235, or a combination thereof.

[0184] In certain aspects, the disclosure relates to a variant ActRIIB polypeptide comprising an amino acid sequence that is at least 75%, 80%, 85%, 90%, 91%, 92%, 93%, 94%, 95%, 96%, 97%, 98%, 99%, or 100% identical to the amino acid sequence of SEQ ID NO: 425. In some embodiments, the variant ActRIIB polypeptide comprises an arginine at the position corresponding to L57 of SEQ ID NO: 2. In some embodiments, the variant ActRIIB polypeptide comprises a serine at the position corresponding to F82 of SEQ ID NO: 2. In some embodiments, the variant ActRIIB polypeptide comprises an arginine at the position corresponding to L57 of SEQ ID NO: 2 and a serine at the position corresponding to F82 of SEQ ID NO: 2. In some embodiments, the amino acid sequence of SEQ ID NO: 425 may optionally be provided with the lysine removed from the C-terminus. The G1Fc region may also comprise a mutation to an alanine at position 234 or a mutation to an alanine at position 235, or a combination thereof.

[0185] In certain aspects, the disclosure relates to a variant ActRIIB polypeptide comprising an amino acid sequence that is at least 75%, 80%, 85%, 90%, 91%, 92%, 93%, 94%, 95%, 96%, 97%, 98%, 99%, or 100% identical to the amino acid sequence of SEQ ID NO: 426. In some embodiments, the variant ActRIIB polypeptide comprises an arginine at the position corresponding to L57 of SEQ ID NO: 2. In some embodiments, the variant ActRIIB polypeptide comprises a threonine at the position corresponding to F82 of SEQ ID NO: 2. In some embodiments, the variant ActRIIB polypeptide comprises an arginine at the position corresponding to L57 of SEQ ID NO: 2 and a threonine at the position corresponding to F82 of SEQ ID NO: 2. In some embodiments, the amino acid sequence of SEQ ID NO: 426 may optionally be provided with the lysine removed from the C-terminus. The G1Fc region may also comprise a mutation to an alanine at position 234 or a mutation to an alanine at position 235, or a combination thereof.

[0186] In certain aspects, the disclosure relates to a variant ActRIIB polypeptide comprising an amino acid sequence that is at least 75%, 80%, 85%, 90%, 91%, 92%, 93%, 94%, 95%, 96%, 97%, 98%, 99%, or 100% identical to the amino acid sequence of SEQ ID NO: 428. In some embodiments, the variant ActRIIB polypeptide comprises an arginine at the position corresponding to L57 of SEQ ID NO: 2. In some embodiments, the variant ActRIIB polypeptide comprises a threonine at the position corresponding to F82 of SEQ ID NO: 2. In some embodiments, the variant ActRIIB polypeptide comprises an arginine at the position corresponding to L57 of SEQ ID NO: 2 and a threonine at the position corresponding to F82 of SEQ ID NO: 2. In some embodiments, the amino acid sequence of SEQ ID NO: 428 may optionally be provided with the lysine removed from the C-terminus. The G1Fc region may also comprise a mutation to an alanine at position 234 or a mutation to an alanine at position 235, or a combination thereof.

[0187] In certain aspects, the disclosure relates to a variant ActRIIB polypeptide comprising an amino acid sequence that is at least 75%, 80%, 85%, 90%, 91%, 92%, 93%, 94%, 95%, 96%, 97%, 98%, 99%, or 100% identical to the amino acid sequence of SEQ ID NO: 429. In some embodiments, the variant ActRIIB polypeptide comprises a phenylalanine at the position corresponding to L79 of SEQ ID NO: 2. In some embodiments, the variant ActRIIB polypeptide comprises an aspartic acid at the position corresponding to F82 of SEQ ID NO: 2. In some embodiments, the variant ActRIIB polypeptide comprises a phenylalanine at the position corresponding to L79 of SEQ ID NO: 2 and an aspartic acid at the position corresponding to F82 of SEQ ID NO: 2. In some embodiments, the amino acid sequence of SEQ ID NO: 429 may optionally be provided with the lysine removed from the C-terminus. The G1Fc region may also comprise a mutation to an alanine at position 234 or a mutation to an alanine at position 235, or a combination thereof.

[0188] In certain aspects, the disclosure relates to a variant ActRIIB polypeptide comprising an amino acid sequence that is at least 75%, 80%, 85%, 90%, 91%, 92%, 93%, 94%, 95%, 96%, 97%, 98%, 99%, or 100% identical to the amino acid sequence of SEQ ID NO: 431. In some embodiments, the variant ActRIIB polypeptide comprises a phenylalanine at the position corresponding to L79 of SEQ ID NO: 2. In some embodiments, the variant ActRIIB polypeptide comprises an aspartic acid at the position corresponding to F82 of SEQ ID NO: 2. In some embodiments, the variant ActRIIB polypeptide comprises a phenylalanine at the position corresponding to L79 of SEQ ID NO: 2 and an aspartic acid at the position corresponding to F82 of SEQ ID NO: 2. In some embodiments, the amino acid sequence of SEQ ID NO: 431 may optionally be provided with the lysine removed from the C-terminus. The G1Fc region may also comprise a mutation to an alanine at position 234 or a mutation to an alanine at position 235, or a combination thereof.

[0189] In certain aspects, the disclosure relates to a variant ActRIIB polypeptide comprising an amino acid sequence that is at least 75%, 80%, 85%, 90%, 91%, 92%, 93%, 94%, 95%, 96%, 97%, 98%, 99%, or 100% identical to the amino acid sequence of SEQ ID NO: 432. In some embodiments, the variant ActRIIB polypeptide comprises a phenylalanine at the position corresponding to L79 of SEQ ID NO: 2. In some embodiments, the variant ActRIIB polypeptide comprises a threonine at the position corresponding to F82 of SEQ ID NO: 2. In some embodiments, the variant ActRIIB polypeptide comprises a phenylalanine at the position corresponding to L79 of SEQ ID NO: 2 and a threonine at the position corresponding to F82 of SEQ ID NO: 2. In some embodiments, the amino acid sequence of SEQ ID NO: 432 may optionally be provided with the lysine removed from the C-terminus. The G1Fc region may also comprise a mutation to an alanine at position 234 or a mutation to an alanine at position 235, or a combination thereof.

[0190] In certain aspects, the disclosure relates to a variant ActRIIB polypeptide comprising an amino acid sequence that is at least 75%, 80%, 85%, 90%, 91%, 92%, 93%, 94%, 95%, 96%, 97%, 98%, 99%, or 100% identical to the amino acid sequence of SEQ ID NO: 434. In some embodiments, the variant ActRIIB polypeptide comprises a phenylalanine at the position corresponding to L79 of SEQ ID NO: 2. In some embodiments, the variant ActRIIB polypeptide comprises a threonine at the position corresponding to F82 of SEQ ID NO: 2. In some embodiments, the variant ActRIIB polypeptide comprises a phenylalanine at the position corresponding to L79 of SEQ ID NO: 2 and a threonine at the position corresponding to F82 of SEQ ID NO: 2. In some embodiments, the amino acid sequence of SEQ ID NO: 434 may optionally be provided with the lysine removed from the C-terminus. The G1Fc region may also comprise a mutation to an alanine at position 234 or a mutation to an alanine at position 235, or a combination thereof.

[0191] In certain aspects, the disclosure relates to a variant ActRIIB polypeptide comprising an amino acid sequence that is at least 75%, 80%, 85%, 90%, 91%, 92%, 93%, 94%, 95%, 96%, 97%, 98%, 99%, or 100% identical to the amino acid sequence of SEQ ID NO: 435. In some embodiments, the variant ActRIIB polypeptide comprises an aspartic acid at the position corresponding to F82 of SEQ ID NO: 2. In some embodiments, the variant ActRIIB polypeptide comprises an arginine at the position corresponding to N83 of SEQ ID NO: 2. In some embodiments, the variant ActRIIB polypeptide comprises an aspartic acid at the position corresponding to F82 of SEQ ID NO: 2 and an arginine at the position corresponding to N83 of SEQ ID NO: 2. In some embodiments, the amino acid sequence of SEQ ID NO: 435 may optionally be provided with the lysine removed from the C-terminus. The G1Fc region may also comprise a mutation to an alanine at position 234 or a mutation to an alanine at position 235, or a combination thereof.

[0192] In certain aspects, the disclosure relates to a variant ActRIIB polypeptide comprising an amino acid sequence that is at least 75%, 80%, 85%, 90%, 91%, 92%, 93%, 94%, 95%, 96%, 97%, 98%, 99%, or 100% identical to the amino acid sequence of SEQ ID NO: 437. In some embodiments, the variant ActRIIB polypeptide comprises an aspartic acid at the position corresponding to F82 of SEQ ID NO: 2. In some embodiments, the variant ActRIIB polypeptide comprises an arginine at the position corresponding to N83 of SEQ ID NO: 2. In some embodiments, the variant ActRIIB polypeptide comprises an aspartic acid at the position corresponding to F82 of SEQ ID NO: 2 and an arginine at the position corresponding to N83 of SEQ ID NO: 2. In some embodiments, the amino acid sequence of SEQ ID NO: 437 may optionally be provided with the lysine removed from the C-terminus. The G1Fc region may also comprise a mutation to an alanine at position 234 or a mutation to an alanine at position 235, or a combination thereof.

[0193] In certain aspects, the disclosure relates to a variant ActRIIB polypeptide comprising an amino acid sequence that is at least 75%, 80%, 85%, 90%, 91%, 92%, 93%, 94%, 95%, 96%, 97%, 98%, 99%, or 100% identical to the amino acid sequence of SEQ ID NO: 438. In some embodiments, the variant ActRIIB polypeptide comprises a glutamic acid at the position corresponding to F82 of SEQ ID NO: 2. In some embodiments, the variant ActRIIB polypeptide comprises an arginine at the position corresponding to N83 of SEQ ID NO: 2. In some embodiments, the variant ActRIIB polypeptide comprises a glutamic acid at the position corresponding to F82 of SEQ ID NO: 2 and an arginine at the position corresponding to N83 of SEQ ID NO: 2. In some embodiments, the amino acid sequence of SEQ ID NO: 438 may optionally be provided with the lysine removed from the C-terminus. The G1Fc region may also comprise a mutation to an alanine at position 234 or a mutation to an alanine at position 235, or a combination thereof.

[0194] In certain aspects, the disclosure relates to a variant ActRIIB polypeptide comprising an amino acid sequence that is at least 75%, 80%, 85%, 90%, 91%, 92%, 93%, 94%, 95%, 96%, 97%, 98%, 99%, or 100% identical to the amino acid sequence of SEQ ID NO: 440. In some embodiments, the variant ActRIIB polypeptide comprises a glutamic acid at the position corresponding to F82 of SEQ ID NO: 2. In some embodiments, the variant ActRIIB polypeptide comprises an arginine at the position corresponding to N83 of SEQ ID NO: 2. In some embodiments, the variant ActRIIB polypeptide comprises a glutamic acid at the position corresponding to F82 of SEQ ID NO: 2 and an arginine at the position corresponding to N83 of SEQ ID NO: 2. In some embodiments, the amino acid sequence of SEQ ID NO: 440 may optionally be provided with the lysine removed from the C-terminus. The G1Fc region may also comprise a mutation to an alanine at position 234 or a mutation to an alanine at position 235, or a combination thereof.

[0195] In certain aspects, the disclosure relates to a variant ActRIIB polypeptide comprising an amino acid sequence that is at least 75%, 80%, 85%, 90%, 91%, 92%, 93%, 94%, 95%, 96%, 97%, 98%, 99%, or 100% identical to the amino acid sequence of SEQ ID NO: 441. In some embodiments, the variant ActRIIB polypeptide comprises a serine at the position corresponding to F82 of SEQ ID NO: 2. In some embodiments, the variant ActRIIB polypeptide comprises an arginine at the position corresponding to N83 of SEQ ID NO: 2. In some embodiments, the variant ActRIIB polypeptide comprises a serine at the position corresponding to F82 of SEQ ID NO: 2 and an arginine at the position corresponding to N83 of SEQ ID NO: 2. In some embodiments, the amino acid sequence of SEQ ID NO: 441 may optionally be provided with the lysine removed from the C-terminus. The G1Fc region may also comprise a mutation to an alanine at position 234 or a mutation to an alanine at position 235, or a combination thereof.

[0196] In certain aspects, the disclosure relates to a variant ActRIIB polypeptide comprising an amino acid sequence that is at least 75%, 80%, 85%, 90%, 91%, 92%, 93%, 94%, 95%, 96%, 97%, 98%, 99%, or 100% identical to the amino acid sequence of SEQ ID NO: 443. In some embodiments, the variant ActRIIB polypeptide comprises a serine at the position corresponding to F82 of SEQ ID NO: 2. In some embodiments, the variant ActRIIB polypeptide comprises an arginine at the position corresponding to N83 of SEQ ID NO: 2. In some embodiments, the variant ActRIIB polypeptide comprises a serine at the position corresponding to F82 of SEQ ID NO: 2 and an arginine at the position corresponding to N83 of SEQ ID NO: 2. In some embodiments, the amino acid sequence of SEQ ID NO: 443 may optionally be provided with the lysine removed from the C-terminus. The G1Fc region may also comprise a mutation to an alanine at position 234 or a mutation to an alanine at position 235, or a combination thereof.

[0197] In certain aspects, the disclosure relates to a variant ActRIIB polypeptide comprising an amino acid sequence that is at least 75%, 80%, 85%, 90%, 91%, 92%, 93%, 94%, 95%, 96%, 97%, 98%, 99%, or 100% identical to the amino acid sequence of SEQ ID NO: 444. In some embodiments, the variant ActRIIB polypeptide comprises a tryptophan at the position corresponding to F82 of SEQ ID NO: 2. In some embodiments, the variant ActRIIB polypeptide comprises an alanine at the position corresponding to N83 of SEQ ID NO: 2. In some embodiments, the variant ActRIIB polypeptide comprises a tryptophan at the position corresponding to F82 of SEQ ID NO: 2 and an alanine at the position corresponding to N83 of SEQ ID NO: 2. In some embodiments, the amino acid sequence of SEQ ID NO: 444 may optionally be provided with the lysine removed from the C-terminus. The G1Fc region may also comprise a mutation to an alanine at position 234 or a mutation to an alanine at position 235, or a combination thereof.

[0198] In certain aspects, the disclosure relates to a variant ActRIIB polypeptide comprising an amino acid sequence that is at least 75%, 80%, 85%, 90%, 91%, 92%, 93%, 94%, 95%, 96%, 97%, 98%, 99%, or 100% identical to the amino acid sequence of SEQ ID NO: 446. In some embodiments, the variant ActRIIB polypeptide comprises a tryptophan at the position corresponding to F82 of SEQ ID NO: 2. In some embodiments, the variant ActRIIB polypeptide comprises an alanine at the position corresponding to N83 of SEQ ID NO: 2. In some embodiments, the variant ActRIIB polypeptide comprises a tryptophan at the position corresponding to F82 of SEQ ID NO: 2 and an alanine at the position corresponding to N83 of SEQ ID NO: 2. In some embodiments, the amino acid sequence of SEQ ID NO: 446 may optionally be provided with the lysine removed from the C-terminus. The G1Fc region may also comprise a mutation to an alanine at position 234 or a mutation to an alanine at position 235, or a combination thereof.

[0199] In certain aspects, the disclosure relates to a variant ActRIIB polypeptide comprising an amino acid sequence that is at least 75%, 80%, 85%, 90%, 91%, 92%, 93%, 94%, 95%, 96%, 97%, 98%, 99%, or 100% identical to the amino acid sequence of SEQ ID NO: 447. In some embodiments, the variant ActRIIB polypeptide comprises an isoleucine at the position corresponding to F82 of SEQ ID NO: 2. In some embodiments, the variant ActRIIB polypeptide comprises a lysine at the position corresponding to E94 of SEQ ID NO: 2. In some embodiments, the variant ActRIIB polypeptide comprises an isoleucine at the position corresponding to F82 of SEQ ID NO: 2 and a lysine at the position corresponding to E94 of SEQ ID NO: 2. In some embodiments, the amino acid sequence of SEQ ID NO: 447 may optionally be provided with the lysine removed from the C-terminus. The G1Fc region may also comprise a mutation to an alanine at position 234 or a mutation to an alanine at position 235, or a combination thereof.

[0200] In certain aspects, the disclosure relates to a variant ActRIIB polypeptide comprising an amino acid sequence that is at least 75%, 80%, 85%, 90%, 91%, 92%, 93%, 94%, 95%, 96%, 97%, 98%, 99%, or 100% identical to the amino acid sequence of SEQ ID NO: 449. In some embodiments, the variant ActRIIB polypeptide comprises an isoleucine at the position corresponding to F82 of SEQ ID NO: 2. In some embodiments, the variant ActRIIB polypeptide comprises a lysine at the position corresponding to E94 of SEQ ID NO: 2. In some embodiments, the variant ActRIIB polypeptide comprises an isoleucine at the position corresponding to F82 of SEQ ID NO: 2 and a lysine at the position corresponding to E94 of SEQ ID NO: 2. In some embodiments, the amino acid sequence of SEQ ID NO: 449 may optionally be provided with the lysine removed from the C-terminus. The G1Fc region may also comprise a mutation to an alanine at position 234 or a mutation to an alanine at position 235, or a combination thereof.

[0201] In certain aspects, the disclosure relates to a variant ActRIIB polypeptide comprising three or more amino acid substitutions as compared to the reference amino acid sequence of SEQ ID NO: 2. In some embodiments, the variant ActRIIB polypeptide comprises a G68R substitution, a F82S substitution, and a N83R substitution. In some embodiments, the variant ActRIIB polypeptide comprises a G68R substitution, a W78Y substitution, and a F82Y substitution. In some embodiments, the variant ActRIIB polypeptide comprises a E52D substitution, a F82D substitution, and a N83R substitution. In some embodiments, the variant ActRIIB polypeptide comprises an E52Y substitution, a F82D substitution, and a N83R substitution. In some embodiments, the variant ActRIIB polypeptide comprises an E52D substitution, a F82E substitution, and a N83R substitution. In some embodiments, the variant ActRIIB polypeptide comprises an E52D substitution, a F82T substitution, and a N83R substitution. In some embodiments, the variant ActRIIB polypeptide comprises an E52N substitution, a F82I substitution, and a N83R substitution. In some embodiments, the variant ActRIIB polypeptide comprises an E52N substitution, a F82Y substitution, and a N83R substitution. In some embodiments, the variant ActRIIB polypeptide comprises an E50L substitution, a F82D substitution, and a N83R substitution. In some embodiments, the variant ActRIIB polypeptide comprises a L57I substitution, a F82D substitution, and a N83R substitution. In some embodiments, the variant ActRIIB polypeptide comprises a L57V substitution, a F82D substitution, and a N83R substitution. In some embodiments, the variant ActRIIB polypeptide comprises a L57R substitution, a F82D substitution, and a N83R substitution. In some embodiments, the variant ActRIIB polypeptide comprises a L57E substitution, a F82E substitution, and a N83R substitution. In some embodiments, the variant ActRIIB polypeptide comprises a L57R substitution, a F82E substitution, and a N83R substitution. In some embodiments, the variant ActRIIB polypeptide comprises a L57I substitution, a F82E substitution, and a N83R substitution. In some embodiments, the variant ActRIIB polypeptide comprises a L57R substitution, a F82L substitution, and a N83R substitution. In some embodiments, the variant ActRIIB polypeptide comprises a L57T substitution, a F82Y substitution, and a N83R substitution. In some embodiments, the variant ActRIIB polypeptide comprises a L57V substitution, a F82Y substitution, and a N83R substitution. In some embodiments, the variant ActRIIB polypeptide may comprise at least two of the amino acid substitutions described in any of the variant ActRIIB polypeptides above.

[0202] In certain aspects, the disclosure relates to a variant ActRIIB polypeptide comprising an amino acid sequence that is at least 75%, 80%, 85%, 90%, 91%, 92%, 93%, 94%, 95%, 96%, 97%, 98%, 99%, or 100% identical to the amino acid sequence of SEQ ID NO: 450. In some embodiments, the variant ActRIIB polypeptide comprises a leucine at the position corresponding to E50 of SEQ ID NO: 2. In some embodiments, the variant ActRIIB polypeptide comprises an aspartic acid at the position corresponding to F82 of SEQ ID NO: 2. In some embodiments, the variant ActRIIB polypeptide comprises an arginine at the position corresponding to N83 of SEQ ID NO: 2. In some embodiments, the variant ActRIIB polypeptide comprises a leucine at the position corresponding to E50 of SEQ ID NO: 2, an aspartic acid at the position corresponding to F82 of SEQ ID NO: 2, and an arginine at the position corresponding to N83 of SEQ ID NO: 2. In some embodiments, the amino acid sequence of SEQ ID NO: 450 may optionally be provided with the lysine removed from the C-terminus. The G1Fc region may also comprise a mutation to an alanine at position 234 or a mutation to an alanine at position 235, or a combination thereof.

[0203] In certain aspects, the disclosure relates to a variant ActRIIB polypeptide comprising an amino acid sequence that is at least 75%, 80%, 85%, 90%, 91%, 92%, 93%, 94%, 95%, 96%, 97%, 98%, 99%, or 100% identical to the amino acid sequence of SEQ ID NO: 452. In some embodiments, the variant ActRIIB polypeptide comprises a leucine at the position corresponding to E50 of SEQ ID NO: 2. In some embodiments, the variant ActRIIB polypeptide comprises an aspartic acid at the position corresponding to F82 of SEQ ID NO: 2. In some embodiments, the variant ActRIIB polypeptide comprises an arginine at the position corresponding to N83 of SEQ ID NO: 2. In some embodiments, the variant ActRIIB polypeptide comprises a leucine at the position corresponding to E50 of SEQ ID NO: 2, an aspartic acid at the position corresponding to F82 of SEQ ID NO: 2, and an arginine at the position corresponding to N83 of SEQ ID NO: 2. In some embodiments, the amino acid sequence of SEQ ID NO: 452 may optionally be provided with the lysine removed from the C-terminus. The G1Fc region may also comprise a mutation to an alanine at position 234 or a mutation to an alanine at position 235, or a combination thereof.

[0204] In certain aspects, the disclosure relates to a variant ActRIIB polypeptide comprising an amino acid sequence that is at least 75%, 80%, 85%, 90%, 91%, 92%, 93%, 94%, 95%, 96%, 97%, 98%, 99%, or 100% identical to the amino acid sequence of SEQ ID NO: 453. In some embodiments, the variant ActRIIB polypeptide comprises an aspartic acid at the position corresponding to E52 of SEQ ID NO: 2. In some embodiments, the variant ActRIIB polypeptide comprises an aspartic acid at the position corresponding to F82 of SEQ ID NO: 2. In some embodiments, the variant ActRIIB polypeptide comprises an arginine at the position corresponding to N83 of SEQ ID NO: 2. In some embodiments, the variant ActRIIB polypeptide comprises an aspartic acid at the position corresponding to E52 of SEQ ID NO: 2, an aspartic acid at the position corresponding to F82 of SEQ ID NO: 2, and an arginine at the position corresponding to N83 of SEQ ID NO: 2. In some embodiments, the amino acid sequence of SEQ ID NO: 453 may optionally be provided with the lysine removed from the C-terminus. The G1Fc region may also comprise a mutation to an alanine at position 234 or a mutation to an alanine at position 235, or a combination thereof.

[0205] In certain aspects, the disclosure relates to a variant ActRIIB polypeptide comprising an amino acid sequence that is at least 75%, 80%, 85%, 90%, 91%, 92%, 93%, 94%, 95%, 96%, 97%, 98%, 99%, or 100% identical to the amino acid sequence of SEQ ID NO: 455. In some embodiments, the variant ActRIIB polypeptide comprises an aspartic acid at the position corresponding to E52 of SEQ ID NO: 2. In some embodiments, the variant ActRIIB polypeptide comprises an aspartic acid at the position corresponding to F82 of SEQ ID NO: 2. In some embodiments, the variant ActRIIB polypeptide comprises an arginine at the position corresponding to N83 of SEQ ID NO: 2. In some embodiments, the variant ActRIIB polypeptide comprises an aspartic acid at the position corresponding to E52 of SEQ ID NO: 2, an aspartic acid at the position corresponding to F82 of SEQ ID NO: 2, and an arginine at the position corresponding to N83 of SEQ ID NO: 2. In some embodiments, the amino acid sequence of SEQ ID NO: 455 may optionally be provided with the lysine removed from the C-terminus. The G1Fc region may also comprise a mutation to an alanine at position 234 or a mutation to an alanine at position 235, or a combination thereof.

[0206] In certain aspects, the disclosure relates to a variant ActRIIB polypeptide comprising an amino acid sequence that is at least 75%, 80%, 85%, 90%, 91%, 92%, 93%, 94%, 95%, 96%, 97%, 98%, 99%, or 100% identical to the amino acid sequence of SEQ ID NO: 456. In some embodiments, the variant ActRIIB polypeptide comprises an aspartic acid at the position corresponding to E52 of SEQ ID NO: 2. In some embodiments, the variant ActRIIB polypeptide comprises a glutamic acid at the position corresponding to F82 of SEQ ID NO: 2. In some embodiments, the variant ActRIIB polypeptide comprises an arginine at the position corresponding to N83 of SEQ ID NO: 2. In some embodiments, the variant ActRIIB polypeptide comprises an aspartic acid at the position corresponding to E52 of SEQ ID NO: 2, a glutamic acid at the position corresponding to F82 of SEQ ID NO: 2, and an arginine at the position corresponding to N83 of SEQ ID NO: 2. In some embodiments, the amino acid sequence of SEQ ID NO: 456 may optionally be provided with the lysine removed from the C-terminus. The G1Fc region may also comprise a mutation to an alanine at position 234 or a mutation to an alanine at position 235, or a combination thereof.

[0207] In certain aspects, the disclosure relates to a variant ActRIIB polypeptide comprising an amino acid sequence that is at least 75%, 80%, 85%, 90%, 91%, 92%, 93%, 94%, 95%, 96%, 97%, 98%, 99%, or 100% identical to the amino acid sequence of SEQ ID NO: 458. In some embodiments, the variant ActRIIB polypeptide comprises an aspartic acid at the position corresponding to E52 of SEQ ID NO: 2. In some embodiments, the variant ActRIIB polypeptide comprises a glutamic acid at the position corresponding to F82 of SEQ ID NO: 2. In some embodiments, the variant ActRIIB polypeptide comprises an arginine at the position corresponding to N83 of SEQ ID NO: 2. In some embodiments, the variant ActRIIB polypeptide comprises an aspartic acid at the position corresponding to E52 of SEQ ID NO: 2, a glutamic acid at the position corresponding to F82 of SEQ ID NO: 2, and an arginine at the position corresponding to N83 of SEQ ID NO: 2. In some embodiments, the amino acid sequence of SEQ ID NO: 458 may optionally be provided with the lysine removed from the C-terminus. The G1Fc region may also comprise a mutation to an alanine at position 234 or a mutation to an alanine at position 235, or a combination thereof.

[0208] In certain aspects, the disclosure relates to a variant ActRIIB polypeptide comprising an amino acid sequence that is at least 75%, 80%, 85%, 90%, 91%, 92%, 93%, 94%, 95%, 96%, 97%, 98%, 99%, or 100% identical to the amino acid sequence of SEQ ID NO: 459. In some embodiments, the variant ActRIIB polypeptide comprises an aspartic acid at the position corresponding to E52 of SEQ ID NO: 2. In some embodiments, the variant ActRIIB polypeptide comprises a threonine at the position corresponding to F82 of SEQ ID NO: 2. In some embodiments, the variant ActRIIB polypeptide comprises an arginine at the position corresponding to N83 of SEQ ID NO: 2. In some embodiments, the variant ActRIIB polypeptide comprises an aspartic acid at the position corresponding to E52 of SEQ ID NO: 2, a threonine at the position corresponding to F82 of SEQ ID NO: 2, and an arginine at the position corresponding to N83 of SEQ ID NO: 2. In some embodiments, the amino acid sequence of SEQ ID NO: 459 may optionally be provided with the lysine removed from the C-terminus. The G1Fc region may also comprise a mutation to an alanine at position 234 or a mutation to an alanine at position 235, or a combination thereof.

[0209] In certain aspects, the disclosure relates to a variant ActRIIB polypeptide comprising an amino acid sequence that is at least 75%, 80%, 85%, 90%, 91%, 92%, 93%, 94%, 95%, 96%, 97%, 98%, 99%, or 100% identical to the amino acid sequence of SEQ ID NO: 461. In some embodiments, the variant ActRIIB polypeptide comprises an aspartic acid at the position corresponding to E52 of SEQ ID NO: 2. In some embodiments, the variant ActRIIB polypeptide comprises a threonine at the position corresponding to F82 of SEQ ID NO: 2. In some embodiments, the variant ActRIIB polypeptide comprises an arginine at the position corresponding to N83 of SEQ ID NO: 2. In some embodiments, the variant ActRIIB polypeptide comprises an aspartic acid at the position corresponding to E52 of SEQ ID NO: 2, a threonine at the position corresponding to F82 of SEQ ID NO: 2, and an arginine at the position corresponding to N83 of SEQ ID NO: 2. In some embodiments, the amino acid sequence of SEQ ID NO: 461 may optionally be provided with the lysine removed from the C-terminus. The G1Fc region may also comprise a mutation to an alanine at position 234 or a mutation to an alanine at position 235, or a combination thereof.

[0210] In certain aspects, the disclosure relates to a variant ActRIIB polypeptide comprising an amino acid sequence that is at least 75%, 80%, 85%, 90%, 91%, 92%, 93%, 94%, 95%, 96%, 97%, 98%, 99%, or 100% identical to the amino acid sequence of SEQ ID NO: 462. In some embodiments, the variant ActRIIB polypeptide comprises an asparagine at the position corresponding to E52 of SEQ ID NO: 2. In some embodiments, the variant ActRIIB polypeptide comprises an isoleucine at the position corresponding to F82 of SEQ ID NO: 2. In some embodiments, the variant ActRIIB polypeptide comprises an arginine at the position corresponding to N83 of SEQ ID NO: 2. In some embodiments, the variant ActRIIB polypeptide comprises an asparagine at the position corresponding to E52 of SEQ ID NO: 2, an isoleucine at the position corresponding to F82 of SEQ ID NO: 2, and an arginine at the position corresponding to N83 of SEQ ID NO: 2. In some embodiments, the amino acid sequence of SEQ ID NO: 462 may optionally be provided with the lysine removed from the C-terminus. The G1Fc region may also comprise a mutation to an alanine at position 234 or a mutation to an alanine at position 235, or a combination thereof.

[0211] In certain aspects, the disclosure relates to a variant ActRIIB polypeptide comprising an amino acid sequence that is at least 75%, 80%, 85%, 90%, 91%, 92%, 93%, 94%, 95%, 96%, 97%, 98%, 99%, or 100% identical to the amino acid sequence of SEQ ID NO: 464. In some embodiments, the variant ActRIIB polypeptide comprises an asparagine at the position corresponding to E52 of SEQ ID NO: 2. In some embodiments, the variant ActRIIB polypeptide comprises an isoleucine at the position corresponding to F82 of SEQ ID NO: 2. In some embodiments, the variant ActRIIB polypeptide comprises an arginine at the position corresponding to N83 of SEQ ID NO: 2. In some embodiments, the variant ActRIIB polypeptide comprises an asparagine at the position corresponding to E52 of SEQ ID NO: 2, an isoleucine at the position corresponding to F82 of SEQ ID NO: 2, and an arginine at the position corresponding to N83 of SEQ ID NO: 2. In some embodiments, the amino acid sequence of SEQ ID NO: 464 may optionally be provided with the lysine removed from the C-terminus. The G1Fc region may also comprise a mutation to an alanine at position 234 or a mutation to an alanine at position 235, or a combination thereof.

[0212] In certain aspects, the disclosure relates to a variant ActRIIB polypeptide comprising an amino acid sequence that is at least 75%, 80%, 85%, 90%, 91%, 92%, 93%, 94%, 95%, 96%, 97%, 98%, 99%, or 100% identical to the amino acid sequence of SEQ ID NO: 465. In some embodiments, the variant ActRIIB polypeptide comprises an asparagine at the position corresponding to E52 of SEQ ID NO: 2. In some embodiments, the variant ActRIIB polypeptide comprises a tyrosine at the position corresponding to F82 of SEQ ID NO: 2. In some embodiments, the variant ActRIIB polypeptide comprises an arginine at the position corresponding to N83 of SEQ ID NO: 2. In some embodiments, the variant ActRIIB polypeptide comprises an asparagine at the position corresponding to E52 of SEQ ID NO: 2, a tyrosine at the position corresponding to F82 of SEQ ID NO: 2, and an arginine at the position corresponding to N83 of SEQ ID NO: 2. In some embodiments, the amino acid sequence of SEQ ID NO: 465 may optionally be provided with the lysine removed from the C-terminus. The G1Fc region may also comprise a mutation to an alanine at position 234 or a mutation to an alanine at position 235, or a combination thereof.

[0213] In certain aspects, the disclosure relates to a variant ActRIIB polypeptide comprising an amino acid sequence that is at least 75%, 80%, 85%, 90%, 91%, 92%, 93%, 94%, 95%, 96%, 97%, 98%, 99%, or 100% identical to the amino acid sequence of SEQ ID NO: 467. In some embodiments, the variant ActRIIB polypeptide comprises an asparagine at the position corresponding to E52 of SEQ ID NO: 2. In some embodiments, the variant ActRIIB polypeptide comprises a tyrosine at the position corresponding to F82 of SEQ ID NO: 2. In some embodiments, the variant ActRIIB polypeptide comprises an arginine at the position corresponding to N83 of SEQ ID NO: 2. In some embodiments, the variant ActRIIB polypeptide comprises an asparagine at the position corresponding to E52 of SEQ ID NO: 2, a tyrosine at the position corresponding to F82 of SEQ ID NO: 2, and an arginine at the position corresponding to N83 of SEQ ID NO: 2. In some embodiments, the amino acid sequence of SEQ ID NO: 467 may optionally be provided with the lysine removed from the C-terminus. The G1Fc region may also comprise a mutation to an alanine at position 234 or a mutation to an alanine at position 235, or a combination thereof.

[0214] In certain aspects, the disclosure relates to a variant ActRIIB polypeptide comprising an amino acid sequence that is at least 75%, 80%, 85%, 90%, 91%, 92%, 93%, 94%, 95%, 96%, 97%, 98%, 99%, or 100% identical to the amino acid sequence of SEQ ID NO: 468. In some embodiments, the variant ActRIIB polypeptide comprises a tyrosine at the position corresponding to E52 of SEQ ID NO: 2. In some embodiments, the variant ActRIIB polypeptide comprises an aspartic acid at the position corresponding to F82 of SEQ ID NO: 2. In some embodiments, the variant ActRIIB polypeptide comprises an arginine at the position corresponding to N83 of SEQ ID NO: 2. In some embodiments, the variant ActRIIB polypeptide comprises a tyrosine at the position corresponding to E52 of SEQ ID NO: 2, an aspartic acid at the position corresponding to F82 of SEQ ID NO: 2, and an arginine at the position corresponding to N83 of SEQ ID NO: 2. In some embodiments, the amino acid sequence of SEQ ID NO: 468 may optionally be provided with the lysine removed from the C-terminus. The G1Fc region may also comprise a mutation to an alanine at position 234 or a mutation to an alanine at position 235, or a combination thereof.

[0215] In certain aspects, the disclosure relates to a variant ActRIIB polypeptide comprising an amino acid sequence that is at least 75%, 80%, 85%, 90%, 91%, 92%, 93%, 94%, 95%, 96%, 97%, 98%, 99%, or 100% identical to the amino acid sequence of SEQ ID NO: 470. In some embodiments, the variant ActRIIB polypeptide comprises a tyrosine at the position corresponding to E52 of SEQ ID NO: 2. In some embodiments, the variant ActRIIB polypeptide comprises an aspartic acid at the position corresponding to F82 of SEQ ID NO: 2. In some embodiments, the variant ActRIIB polypeptide comprises an arginine at the position corresponding to N83 of SEQ ID NO: 2. In some embodiments, the variant ActRIIB polypeptide comprises a tyrosine at the position corresponding to E52 of SEQ ID NO: 2, an aspartic acid at the position corresponding to F82 of SEQ ID NO: 2, and an arginine at the position corresponding to N83 of SEQ ID NO: 2. In some embodiments, the amino acid sequence of SEQ ID NO: 470 may optionally be provided with the lysine removed from the C-terminus. The G1Fc region may also comprise a mutation to an alanine at position 234 or a mutation to an alanine at position 235, or a combination thereof.

[0216] In certain aspects, the disclosure relates to a variant ActRIIB polypeptide comprising an amino acid sequence that is at least 75%, 80%, 85%, 90%, 91%, 92%, 93%, 94%, 95%, 96%, 97%, 98%, 99%, or 100% identical to the amino acid sequence of SEQ ID NO: 471. In some embodiments, the variant ActRIIB polypeptide comprises a glutamic acid at the position corresponding to L57 of SEQ ID NO: 2. In some embodiments, the variant ActRIIB polypeptide comprises a glutamic acid at the position corresponding to F82 of SEQ ID NO: 2. In some embodiments, the variant ActRIIB polypeptide comprises an arginine at the position corresponding to N83 of SEQ ID NO: 2. In some embodiments, the variant ActRIIB polypeptide comprises a glutamic acid at the position corresponding to L57 of SEQ ID NO: 2, a glutamic acid at the position corresponding to F82 of SEQ ID NO: 2, and an arginine at the position corresponding to N83 of SEQ ID NO: 2. In some embodiments, the amino acid sequence of SEQ ID NO: 471 may optionally be provided with the lysine removed from the C-terminus. The G1Fc region may also comprise a mutation to an alanine at position 234 or a mutation to an alanine at position 235, or a combination thereof.

[0217] In certain aspects, the disclosure relates to a variant ActRIIB polypeptide comprising an amino acid sequence that is at least 75%, 80%, 85%, 90%, 91%, 92%, 93%, 94%, 95%, 96%, 97%, 98%, 99%, or 100% identical to the amino acid sequence of SEQ ID NO: 473. In some embodiments, the variant ActRIIB polypeptide comprises a glutamic acid at the position corresponding to L57 of SEQ ID NO: 2. In some embodiments, the variant ActRIIB polypeptide comprises a glutamic acid at the position corresponding to F82 of SEQ ID NO: 2. In some embodiments, the variant ActRIIB polypeptide comprises an arginine at the position corresponding to N83 of SEQ ID NO: 2. In some embodiments, the variant ActRIIB polypeptide comprises a glutamic acid at the position corresponding to L57 of SEQ ID NO: 2, a glutamic acid at the position corresponding to F82 of SEQ ID NO: 2, and an arginine at the position corresponding to N83 of SEQ ID NO: 2. In some embodiments, the amino acid sequence of SEQ ID NO: 473 may optionally be provided with the lysine removed from the C-terminus. The G1Fc region may also comprise a mutation to an alanine at position 234 or a mutation to an alanine at position 235, or a combination thereof.

[0218] In certain aspects, the disclosure relates to a variant ActRIIB polypeptide comprising an amino acid sequence that is at least 75%, 80%, 85%, 90%, 91%, 92%, 93%, 94%, 95%, 96%, 97%, 98%, 99%, or 100% identical to the amino acid sequence of SEQ ID NO: 474. In some embodiments, the variant ActRIIB polypeptide comprises an isoleucine at the position corresponding to L57 of SEQ ID NO: 2. In some embodiments, the variant ActRIIB polypeptide comprises an aspartic acid at the position corresponding to F82 of SEQ ID NO: 2. In some embodiments, the variant ActRIIB polypeptide comprises an arginine at the position corresponding to N83 of SEQ ID NO: 2. In some embodiments, the variant ActRIIB polypeptide comprises an isoleucine at the position corresponding to L57 of SEQ ID NO: 2, an aspartic acid at the position corresponding to F82 of SEQ ID NO: 2, and an arginine at the position corresponding to N83 of SEQ ID NO: 2. In some embodiments, the amino acid sequence of SEQ ID NO: 474 may optionally be provided with the lysine removed from the C-terminus. The G1Fc region may also comprise a mutation to an alanine at position 234 or a mutation to an alanine at position 235, or a combination thereof.

[0219] In certain aspects, the disclosure relates to a variant ActRIIB polypeptide comprising an amino acid sequence that is at least 75%, 80%, 85%, 90%, 91%, 92%, 93%, 94%, 95%, 96%, 97%, 98%, 99%, or 100% identical to the amino acid sequence of SEQ ID NO: 476. In some embodiments, the variant ActRIIB polypeptide comprises an isoleucine at the position corresponding to L57 of SEQ ID NO: 2. In some embodiments, the variant ActRIIB polypeptide comprises an aspartic acid at the position corresponding to F82 of SEQ ID NO: 2. In some embodiments, the variant ActRIIB polypeptide comprises an arginine at the position corresponding to N83 of SEQ ID NO: 2. In some embodiments, the variant ActRIIB polypeptide comprises an isoleucine at the position corresponding to L57 of SEQ ID NO: 2, an aspartic acid at the position corresponding to F82 of SEQ ID NO: 2, and an arginine at the position corresponding to N83 of SEQ ID NO: 2. In some embodiments, the amino acid sequence of SEQ ID NO: 476 may optionally be provided with the lysine removed from the C-terminus. The G1Fc region may also comprise a mutation to an alanine at position 234 or a mutation to an alanine at position 235, or a combination thereof.

[0220] In certain aspects, the disclosure relates to a variant ActRIIB polypeptide comprising an amino acid sequence that is at least 75%, 80%, 85%, 90%, 91%, 92%, 93%, 94%, 95%, 96%, 97%, 98%, 99%, or 100% identical to the amino acid sequence of SEQ ID NO: 477. In some embodiments, the variant ActRIIB polypeptide comprises an isoleucine at the position corresponding to L57 of SEQ ID NO: 2. In some embodiments, the variant ActRIIB polypeptide comprises a glutamic acid at the position corresponding to F82 of SEQ ID NO: 2. In some embodiments, the variant ActRIIB polypeptide comprises an arginine at the position corresponding to N83 of SEQ ID NO: 2. In some embodiments, the variant ActRIIB polypeptide comprises an isoleucine at the position corresponding to L57 of SEQ ID NO: 2, a glutamic acid at the position corresponding to F82 of SEQ ID NO: 2, and an arginine at the position corresponding to N83 of SEQ ID NO: 2. In some embodiments, the amino acid sequence of SEQ ID NO: 477 may optionally be provided with the lysine removed from the C-terminus. The G1Fc region may also comprise a mutation to an alanine at position 234 or a mutation to an alanine at position 235, or a combination thereof.

[0221] In certain aspects, the disclosure relates to a variant ActRIIB polypeptide comprising an amino acid sequence that is at least 75%, 80%, 85%, 90%, 91%, 92%, 93%, 94%, 95%, 96%, 97%, 98%, 99%, or 100% identical to the amino acid sequence of SEQ ID NO: 479. In some embodiments, the variant ActRIIB polypeptide comprises an isoleucine at the position corresponding to L57 of SEQ ID NO: 2. In some embodiments, the variant ActRIIB polypeptide comprises a glutamic acid at the position corresponding to F82 of SEQ ID NO: 2. In some embodiments, the variant ActRIIB polypeptide comprises an arginine at the position corresponding to N83 of SEQ ID NO: 2. In some embodiments, the variant ActRIIB polypeptide comprises an isoleucine at the position corresponding to L57 of SEQ ID NO: 2, a glutamic acid at the position corresponding to F82 of SEQ ID NO: 2, and an arginine at the position corresponding to N83 of SEQ ID NO: 2. In some embodiments, the amino acid sequence of SEQ ID NO: 479 may optionally be provided with the lysine removed from the C-terminus. The G1Fc region may also comprise a mutation to an alanine at position 234 or a mutation to an alanine at position 235, or a combination thereof.

[0222] In certain aspects, the disclosure relates to a variant ActRIIB polypeptide comprising an amino acid sequence that is at least 75%, 80%, 85%, 90%, 91%, 92%, 93%, 94%, 95%, 96%, 97%, 98%, 99%, or 100% identical to the amino acid sequence of SEQ ID NO: 480. In some embodiments, the variant ActRIIB polypeptide comprises an arginine at the position corresponding to L57 of SEQ ID NO: 2. In some embodiments, the variant ActRIIB polypeptide comprises an aspartic acid at the position corresponding to F82 of SEQ ID NO: 2. In some embodiments, the variant ActRIIB polypeptide comprises an arginine at the position corresponding to N83 of SEQ ID NO: 2. In some embodiments, the variant ActRIIB polypeptide comprises an arginine at the position corresponding to L57 of SEQ ID NO: 2, an aspartic acid at the position corresponding to F82 of SEQ ID NO: 2, and an arginine at the position corresponding to N83 of SEQ ID NO: 2. In some embodiments, the amino acid sequence of SEQ ID NO: 480 may optionally be provided with the lysine removed from the C-terminus. The G1Fc region may also comprise a mutation to an alanine at position 234 or a mutation to an alanine at position 235, or a combination thereof.

[0223] In certain aspects, the disclosure relates to a variant ActRIIB polypeptide comprising an amino acid sequence that is at least 75%, 80%, 85%, 90%, 91%, 92%, 93%, 94%, 95%, 96%, 97%, 98%, 99%, or 100% identical to the amino acid sequence of SEQ ID NO: 482. In some embodiments, the variant ActRIIB polypeptide comprises an arginine at the position corresponding to L57 of SEQ ID NO: 2. In some embodiments, the variant ActRIIB polypeptide comprises an aspartic acid at the position corresponding to F82 of SEQ ID NO: 2. In some embodiments, the variant ActRIIB polypeptide comprises an arginine at the position corresponding to N83 of SEQ ID NO: 2. In some embodiments, the variant ActRIIB polypeptide comprises an arginine at the position corresponding to L57 of SEQ ID NO: 2, an aspartic acid at the position corresponding to F82 of SEQ ID NO: 2, and an arginine at the position corresponding to N83 of SEQ ID NO: 2. In some embodiments, the amino acid sequence of SEQ ID NO: 482 may optionally be provided with the lysine removed from the C-terminus. The G1Fc region may also comprise a mutation to an alanine at position 234 or a mutation to an alanine at position 235, or a combination thereof.

[0224] In certain aspects, the disclosure relates to a variant ActRIIB polypeptide comprising an amino acid sequence that is at least 75%, 80%, 85%, 90%, 91%, 92%, 93%, 94%, 95%, 96%, 97%, 98%, 99%, or 100% identical to the amino acid sequence of SEQ ID NO: 483. In some embodiments, the variant ActRIIB polypeptide comprises an arginine at the position corresponding to L57 of SEQ ID NO: 2. In some embodiments, the variant ActRIIB polypeptide comprises a glutamic acid at the position corresponding to F82 of SEQ ID NO: 2. In some embodiments, the variant ActRIIB polypeptide comprises an arginine at the position corresponding to N83 of SEQ ID NO: 2. In some embodiments, the variant ActRIIB polypeptide comprises an arginine at the position corresponding to L57 of SEQ ID NO: 2, a glutamic acid at the position corresponding to F82 of SEQ ID NO: 2, and an arginine at the position corresponding to N83 of SEQ ID NO: 2. In some embodiments, the amino acid sequence of SEQ ID NO: 483 may optionally be provided with the lysine removed from the C-terminus. The G1Fc region may also comprise a mutation to an alanine at position 234 or a mutation to an alanine at position 235, or a combination thereof.

[0225] In certain aspects, the disclosure relates to a variant ActRIIB polypeptide comprising an amino acid sequence that is at least 75%, 80%, 85%, 90%, 91%, 92%, 93%, 94%, 95%, 96%, 97%, 98%, 99%, or 100% identical to the amino acid sequence of SEQ ID NO: 485. In some embodiments, the variant ActRIIB polypeptide comprises an arginine at the position corresponding to L57 of SEQ ID NO: 2. In some embodiments, the variant ActRIIB polypeptide comprises a glutamic acid at the position corresponding to F82 of SEQ ID NO: 2. In some embodiments, the variant ActRIIB polypeptide comprises an arginine at the position corresponding to N83 of SEQ ID NO: 2. In some embodiments, the variant ActRIIB polypeptide comprises an arginine at the position corresponding to L57 of SEQ ID NO: 2, a glutamic acid at the position corresponding to F82 of SEQ ID NO: 2, and an arginine at the position corresponding to N83 of SEQ ID NO: 2. In some embodiments, the amino acid sequence of SEQ ID NO: 485 may optionally be provided with the lysine removed from the C-terminus. The G1Fc region may also comprise a mutation to an alanine at position 234 or a mutation to an alanine at position 235, or a combination thereof.

[0226] In certain aspects, the disclosure relates to a variant ActRIIB polypeptide comprising an amino acid sequence that is at least 75%, 80%, 85%, 90%, 91%, 92%, 93%, 94%, 95%, 96%, 97%, 98%, 99%, or 100% identical to the amino acid sequence of SEQ ID NO: 486. In some embodiments, the variant ActRIIB polypeptide comprises an arginine at the position corresponding to L57 of SEQ ID NO: 2. In some embodiments, the variant ActRIIB polypeptide comprises a leucine at the position corresponding to F82 of SEQ ID NO: 2. In some embodiments, the variant ActRIIB polypeptide comprises an arginine at the position corresponding to N83 of SEQ ID NO: 2. In some embodiments, the variant ActRIIB polypeptide comprises an arginine at the position corresponding to L57 of SEQ ID NO: 2, a leucine at the position corresponding to F82 of SEQ ID NO: 2, and an arginine at the position corresponding to N83 of SEQ ID NO: 2. In some embodiments, the amino acid sequence of SEQ ID NO: 486 may optionally be provided with the lysine removed from the C-terminus. The G1Fc region may also comprise a mutation to an alanine at position 234 or a mutation to an alanine at position 235, or a combination thereof.

[0227] In certain aspects, the disclosure relates to a variant ActRIIB polypeptide comprising an amino acid sequence that is at least 75%, 80%, 85%, 90%, 91%, 92%, 93%, 94%, 95%, 96%, 97%, 98%, 99%, or 100% identical to the amino acid sequence of SEQ ID NO: 488. In some embodiments, the variant ActRIIB polypeptide comprises an arginine at the position corresponding to L57 of SEQ ID NO: 2. In some embodiments, the variant ActRIIB polypeptide comprises a leucine at the position corresponding to F82 of SEQ ID NO: 2. In some embodiments, the variant ActRIIB polypeptide comprises an arginine at the position corresponding to N83 of SEQ ID NO: 2. In some embodiments, the variant ActRIIB polypeptide comprises an arginine at the position corresponding to L57 of SEQ ID NO: 2, a leucine at the position corresponding to F82 of SEQ ID NO: 2, and an arginine at the position corresponding to N83 of SEQ ID NO: 2. In some embodiments, the amino acid sequence of SEQ ID NO: 488 may optionally be provided with the lysine removed from the C-terminus. The G1Fc region may also comprise a mutation to an alanine at position 234 or a mutation to an alanine at position 235, or a combination thereof.

[0228] In certain aspects, the disclosure relates to a variant ActRIIB polypeptide comprising an amino acid sequence that is at least 75%, 80%, 85%, 90%, 91%, 92%, 93%, 94%, 95%, 96%, 97%, 98%, 99%, or 100% identical to the amino acid sequence of SEQ ID NO: 489. In some embodiments, the variant ActRIIB polypeptide comprises a threonine at the position corresponding to L57 of SEQ ID NO: 2. In some embodiments, the variant ActRIIB polypeptide comprises a tyrosine at the position corresponding to F82 of SEQ ID NO: 2. In some embodiments, the variant ActRIIB polypeptide comprises an arginine at the position corresponding to N83 of SEQ ID NO: 2. In some embodiments, the variant ActRIIB polypeptide comprises a threonine at the position corresponding to L57 of SEQ ID NO: 2, a tyrosine at the position corresponding to F82 of SEQ ID NO: 2, and an arginine at the position corresponding to N83 of SEQ ID NO: 2. In some embodiments, the amino acid sequence of SEQ ID NO: 489 may optionally be provided with the lysine removed from the C-terminus. The G1Fc region may also comprise a mutation to an alanine at position 234 or a mutation to an alanine at position 235, or a combination thereof.

[0229] In certain aspects, the disclosure relates to a variant ActRIIB polypeptide comprising an amino acid sequence that is at least 75%, 80%, 85%, 90%, 91%, 92%, 93%, 94%, 95%, 96%, 97%, 98%, 99%, or 100% identical to the amino acid sequence of SEQ ID NO: 491. In some embodiments, the variant ActRIIB polypeptide comprises a threonine at the position corresponding to L57 of SEQ ID NO: 2. In some embodiments, the variant ActRIIB polypeptide comprises a tyrosine at the position corresponding to F82 of SEQ ID NO: 2. In some embodiments, the variant ActRIIB polypeptide comprises an arginine at the position corresponding to N83 of SEQ ID NO: 2. In some embodiments, the variant ActRIIB polypeptide comprises a threonine at the position corresponding to L57 of SEQ ID NO: 2, a tyrosine at the position corresponding to F82 of SEQ ID NO: 2, and an arginine at the position corresponding to N83 of SEQ ID NO: 2. In some embodiments, the amino acid sequence of SEQ ID NO: 491 may optionally be provided with the lysine removed from the C-terminus. The G1Fc region may also comprise a mutation to an alanine at position 234 or a mutation to an alanine at position 235, or a combination thereof.

[0230] In certain aspects, the disclosure relates to a variant ActRIIB polypeptide comprising an amino acid sequence that is at least 75%, 80%, 85%, 90%, 91%, 92%, 93%, 94%, 95%, 96%, 97%, 98%, 99%, or 100% identical to the amino acid sequence of SEQ ID NO: 492. In some embodiments, the variant ActRIIB polypeptide comprises a valine at the position corresponding to L57 of SEQ ID NO: 2. In some embodiments, the variant ActRIIB polypeptide comprises an aspartic acid at the position corresponding to F82 of SEQ ID NO: 2. In some embodiments, the variant ActRIIB polypeptide comprises an arginine at the position corresponding to N83 of SEQ ID NO: 2. In some embodiments, the variant ActRIIB polypeptide comprises a valine at the position corresponding to L57 of SEQ ID NO: 2, an aspartic acid at the position corresponding to F82 of SEQ ID NO: 2, and an arginine at the position corresponding to N83 of SEQ ID NO: 2. In some embodiments, the amino acid sequence of SEQ ID NO: 492 may optionally be provided with the lysine removed from the C-terminus. The G1Fc region may also comprise a mutation to an alanine at position 234 or a mutation to an alanine at position 235, or a combination thereof.

[0231] In certain aspects, the disclosure relates to a variant ActRIIB polypeptide comprising an amino acid sequence that is at least 75%, 80%, 85%, 90%, 91%, 92%, 93%, 94%, 95%, 96%, 97%, 98%, 99%, or 100% identical to the amino acid sequence of SEQ ID NO: 494. In some embodiments, the variant ActRIIB polypeptide comprises a valine at the position corresponding to L57 of SEQ ID NO: 2. In some embodiments, the variant ActRIIB polypeptide comprises an aspartic acid at the position corresponding to F82 of SEQ ID NO: 2. In some embodiments, the variant ActRIIB polypeptide comprises an arginine at the position corresponding to N83 of SEQ ID NO: 2. In some embodiments, the variant ActRIIB polypeptide comprises a valine at the position corresponding to L57 of SEQ ID NO: 2, an aspartic acid at the position corresponding to F82 of SEQ ID NO: 2, and an arginine at the position corresponding to N83 of SEQ ID NO: 2. In some embodiments, the amino acid sequence of SEQ ID NO: 494 may optionally be provided with the lysine removed from the C-terminus. The G1Fc region may also comprise a mutation to an alanine at position 234 or a mutation to an alanine at position 235, or a combination thereof.

[0232] In certain aspects, the disclosure relates to a variant ActRIIB polypeptide comprising an amino acid sequence that is at least 75%, 80%, 85%, 90%, 91%, 92%, 93%, 94%, 95%, 96%, 97%, 98%, 99%, or 100% identical to the amino acid sequence of SEQ ID NO: 495. In some embodiments, the variant ActRIIB polypeptide comprises a valine at the position corresponding to L57 of SEQ ID NO: 2. In some embodiments, the variant ActRIIB polypeptide comprises a tyrosine at the position corresponding to F82 of SEQ ID NO: 2. In some embodiments, the variant ActRIIB polypeptide comprises an arginine at the position corresponding to N83 of SEQ ID NO: 2. In some embodiments, the variant ActRIIB polypeptide comprises a valine at the position corresponding to L57 of SEQ ID NO: 2, a tyrosine at the position corresponding to F82 of SEQ ID NO: 2, and an arginine at the position corresponding to N83 of SEQ ID NO: 2. In some embodiments, the amino acid sequence of SEQ ID NO: 495 may optionally be provided with the lysine removed from the C-terminus. The G1Fc region may also comprise a mutation to an alanine at position 234 or a mutation to an alanine at position 235, or a combination thereof.

[0233] In certain aspects, the disclosure relates to a variant ActRIIB polypeptide comprising an amino acid sequence that is at least 75%, 80%, 85%, 90%, 91%, 92%, 93%, 94%, 95%, 96%, 97%, 98%, 99%, or 100% identical to the amino acid sequence of SEQ ID NO: 497. In some embodiments, the variant ActRIIB polypeptide comprises a valine at the position corresponding to L57 of SEQ ID NO: 2. In some embodiments, the variant ActRIIB polypeptide comprises a tyrosine at the position corresponding to F82 of SEQ ID NO: 2. In some embodiments, the variant ActRIIB polypeptide comprises an arginine at the position corresponding to N83 of SEQ ID NO: 2. In some embodiments, the variant ActRIIB polypeptide comprises a valine at the position corresponding to L57 of SEQ ID NO: 2, a tyrosine at the position corresponding to F82 of SEQ ID NO: 2, and an arginine at the position corresponding to N83 of SEQ ID NO: 2. In some embodiments, the amino acid sequence of SEQ ID NO: 497 may optionally be provided with the lysine removed from the C-terminus. The G1Fc region may also comprise a mutation to an alanine at position 234 or a mutation to an alanine at position 235, or a combination thereof.

[0234] In certain aspects, the disclosure relates to a variant ActRIIB polypeptide comprising an amino acid sequence that is at least 75%, 80%, 85%, 90%, 91%, 92%, 93%, 94%, 95%, 96%, 97%, 98%, 99%, or 100% identical to the amino acid sequence of SEQ ID NO: 498. In some embodiments, the variant ActRIIB polypeptide comprises an arginine at the position corresponding to G68 of SEQ ID NO: 2. In some embodiments, the variant ActRIIB polypeptide comprises a tyrosine at the position corresponding to W78 of SEQ ID NO: 2. In some embodiments, the variant ActRIIB polypeptide comprises a tyrosine at the position corresponding to F82 of SEQ ID NO: 2. In some embodiments, the variant ActRIIB polypeptide comprises an arginine at the position corresponding to G68 of SEQ ID NO: 2, a tyrosine at the position corresponding to W78 of SEQ ID NO: 2, and a tyrosine at the position corresponding to F82 of SEQ ID NO: 2. In some embodiments, the amino acid sequence of SEQ ID NO: 498 may optionally be provided with the lysine removed from the C-terminus. The G1Fc region may also comprise a mutation to an alanine at position 234 or a mutation to an alanine at position 235, or a combination thereof.

[0235] In certain aspects, the disclosure relates to a variant ActRIIB polypeptide comprising an amino acid sequence that is at least 75%, 80%, 85%, 90%, 91%, 92%, 93%, 94%, 95%, 96%, 97%, 98%, 99%, or 100% identical to the amino acid sequence of SEQ ID NO: 500. In some embodiments, the variant ActRIIB polypeptide comprises an arginine at the position corresponding to G68 of SEQ ID NO: 2. In some embodiments, the variant ActRIIB polypeptide comprises a tyrosine at the position corresponding to W78 of SEQ ID NO: 2. In some embodiments, the variant ActRIIB polypeptide comprises a tyrosine at the position corresponding to F82 of SEQ ID NO: 2. In some embodiments, the variant ActRIIB polypeptide comprises an arginine at the position corresponding to G68 of SEQ ID NO: 2, a tyrosine at the position corresponding to W78 of SEQ ID NO: 2, and a tyrosine at the position corresponding to F82 of SEQ ID NO: 2. In some embodiments, the amino acid sequence of SEQ ID NO: 500 may optionally be provided with the lysine removed from the C-terminus. The G1Fc region may also comprise a mutation to an alanine at position 234 or a mutation to an alanine at position 235, or a combination thereof.

[0236] In certain aspects, the disclosure relates to a variant ActRIIB polypeptide comprising an amino acid sequence that is at least 75%, 80%, 85%, 90%, 91%, 92%, 93%, 94%, 95%, 96%, 97%, 98%, 99%, or 100% identical to the amino acid sequence of SEQ ID NO: 501. In some embodiments, the variant ActRIIB polypeptide comprises an arginine at the position corresponding to G68 of SEQ ID NO: 2. In some embodiments, the variant ActRIIB polypeptide comprises a serine at the position corresponding to F82 of SEQ ID NO: 2. In some embodiments, the variant ActRIIB polypeptide comprises an arginine at the position corresponding to N83 of SEQ ID NO: 2. In some embodiments, the variant ActRIIB polypeptide comprises an arginine at the position corresponding to G68 of SEQ ID NO: 2, a serine at the position corresponding to F82 of SEQ ID NO: 2, and an arginine at the position corresponding to N83 of SEQ ID NO: 2. In some embodiments, the amino acid sequence of SEQ ID NO: 501 may optionally be provided with the lysine removed from the C-terminus. The G1Fc region may also comprise a mutation to an alanine at position 234 or a mutation to an alanine at position 235, or a combination thereof.

[0237] In certain aspects, the disclosure relates to a variant ActRIIB polypeptide comprising an amino acid sequence that is at least 75%, 80%, 85%, 90%, 91%, 92%, 93%, 94%, 95%, 96%, 97%, 98%, 99%, or 100% identical to the amino acid sequence of SEQ ID NO: 503. In some embodiments, the variant ActRIIB polypeptide comprises an arginine at the position corresponding to G68 of SEQ ID NO: 2. In some embodiments, the variant ActRIIB polypeptide comprises a serine at the position corresponding to F82 of SEQ ID NO: 2. In some embodiments, the variant ActRIIB polypeptide comprises an arginine at the position corresponding to N83 of SEQ ID NO: 2. In some embodiments, the variant ActRIIB polypeptide comprises an arginine at the position corresponding to G68 of SEQ ID NO: 2, a serine at the position corresponding to F82 of SEQ ID NO: 2, and an arginine at the position corresponding to N83 of SEQ ID NO: 2. In some embodiments, the amino acid sequence of SEQ ID NO: 503 may optionally be provided with the lysine removed from the C-terminus. The G1Fc region may also comprise a mutation to an alanine at position 234 or a mutation to an alanine at position 235, or a combination thereof.

[0238] In certain aspects, the disclosure relates to a variant ActRIIB polypeptide comprising four or more amino acid substitutions as compared to the reference amino acid sequence of SEQ ID NO: 2. For example, in some embodiments, the variant ActRIIB polypeptide comprises a G68R substitution, a L79E substitution, a F82Y substitution, and a N83R substitution. In some embodiments, the variant ActRIIB polypeptide comprises a G68R substitution, a L79E substitution, a F82T substitution, and a N83R substitution. In some embodiments, the variant ActRIIB polypeptide comprises a G68R substitution, a L79T substitution, a F82T substitution, and a N83R substitution. In some embodiments, the variant ActRIIB polypeptide comprises an E52N substitution, a G68R substitution, a F82Y substitution, and a N83R substitution. In some embodiments, the variant ActRIIB polypeptide may comprise at least two of the amino acid substitutions described in any of the variant ActRIIB polypeptides above. In some embodiments, the variant ActRIIB polypeptide may comprise at least three of the amino acid substitutions described in any of the variant ActRIIB polypeptides above.

[0239] In certain aspects, the disclosure relates to a variant ActRIIB polypeptide comprising an amino acid sequence that is at least 75%, 80%, 85%, 90%, 91%, 92%, 93%, 94%, 95%, 96%, 97%, 98%, 99%, or 100% identical to the amino acid sequence of SEQ ID NO: 504. In some embodiments, the variant ActRIIB polypeptide comprises an asparagine at the position corresponding to E52 of SEQ ID NO: 2. In some embodiments, the variant ActRIIB polypeptide comprises an arginine at the position corresponding to G68 of SEQ ID NO: 2. In some embodiments, the variant ActRIIB polypeptide comprises a tyrosine at the position corresponding to F82 of SEQ ID NO: 2. In some embodiments, the variant ActRIIB polypeptide comprises an arginine at the position corresponding to N83 of SEQ ID NO: 2. In some embodiments, the variant ActRIIB polypeptide comprises an asparagine at the position corresponding to E52 of SEQ ID NO: 2, an arginine at the position corresponding to G68 of SEQ ID NO: 2, a tyrosine at the position corresponding to F82 of SEQ ID NO: 2, and an arginine at the position corresponding to N83 of SEQ ID NO: 2. In some embodiments, the amino acid sequence of SEQ ID NO: 504 may optionally be provided with the lysine removed from the C-terminus. The G1Fc region may also comprise a mutation to an alanine at position 234 or a mutation to an alanine at position 235, or a combination thereof.

[0240] In certain aspects, the disclosure relates to a variant ActRIIB polypeptide comprising an amino acid sequence that is at least 75%, 80%, 85%, 90%, 91%, 92%, 93%, 94%, 95%, 96%, 97%, 98%, 99%, or 100% identical to the amino acid sequence of SEQ ID NO: 506. In some embodiments, the variant ActRIIB polypeptide comprises an asparagine at the position corresponding to E52 of SEQ ID NO: 2. In some embodiments, the variant ActRIIB polypeptide comprises an arginine at the position corresponding to G68 of SEQ ID NO: 2. In some embodiments, the variant ActRIIB polypeptide comprises a tyrosine at the position corresponding to F82 of SEQ ID NO: 2. In some embodiments, the variant ActRIIB polypeptide comprises an arginine at the position corresponding to N83 of SEQ ID NO: 2. In some embodiments, the variant ActRIIB polypeptide comprises an asparagine at the position corresponding to E52 of SEQ ID NO: 2, an arginine at the position corresponding to G68 of SEQ ID NO: 2, a tyrosine at the position corresponding to F82 of SEQ ID NO: 2, and an arginine at the position corresponding to N83 of SEQ ID NO: 2. In some embodiments, the amino acid sequence of SEQ ID NO: 506 may optionally be provided with the lysine removed from the C-terminus. The G1Fc region may also comprise a mutation to an alanine at position 234 or a mutation to an alanine at position 235, or a combination thereof.

[0241] In certain aspects, the disclosure relates to a variant ActRIIB polypeptide comprising an amino acid sequence that is at least 75%, 80%, 85%, 90%, 91%, 92%, 93%, 94%, 95%, 96%, 97%, 98%, 99%, or 100% identical to the amino acid sequence of SEQ ID NO: 507. In some embodiments, the variant ActRIIB polypeptide comprises an arginine at the position corresponding to G68 of SEQ ID NO: 2. In some embodiments, the variant ActRIIB polypeptide comprises a glutamic acid at the position corresponding to L79 of SEQ ID NO: 2. In some embodiments, the variant ActRIIB polypeptide comprises a threonine at the position corresponding to F82 of SEQ ID NO: 2. In some embodiments, the variant ActRIIB polypeptide comprises an arginine at the position corresponding to N83 of SEQ ID NO: 2. In some embodiments, the variant ActRIIB polypeptide comprises an arginine at the position corresponding to G68 of SEQ ID NO: 2, a glutamic acid at the position corresponding to L79 of SEQ ID NO: 2, a threonine at the position corresponding to F82 of SEQ ID NO: 2, and an arginine at the position corresponding to N83 of SEQ ID NO: 2. In some embodiments, the amino acid sequence of SEQ ID NO: 507 may optionally be provided with the lysine removed from the C-terminus. The G1Fc region may also comprise a mutation to an alanine at position 234 or a mutation to an alanine at position 235, or a combination thereof.

[0242] In certain aspects, the disclosure relates to a variant ActRIIB polypeptide comprising an amino acid sequence that is at least 75%, 80%, 85%, 90%, 91%, 92%, 93%, 94%, 95%, 96%, 97%, 98%, 99%, or 100% identical to the amino acid sequence of SEQ ID NO: 509. In some embodiments, the variant ActRIIB polypeptide comprises an arginine at the position corresponding to G68 of SEQ ID NO: 2. In some embodiments, the variant ActRIIB polypeptide comprises a glutamic acid at the position corresponding to L79 of SEQ ID NO: 2. In some embodiments, the variant ActRIIB polypeptide comprises a threonine at the position corresponding to F82 of SEQ ID NO: 2. In some embodiments, the variant ActRIIB polypeptide comprises an arginine at the position corresponding to N83 of SEQ ID NO: 2. In some embodiments, the variant ActRIIB polypeptide comprises an arginine at the position corresponding to G68 of SEQ ID NO: 2, a glutamic acid at the position corresponding to L79 of SEQ ID NO: 2, a threonine at the position corresponding to F82 of SEQ ID NO: 2, and an arginine at the position corresponding to N83 of SEQ ID NO: 2. In some embodiments, the amino acid sequence of SEQ ID NO: 509 may optionally be provided with the lysine removed from the C-terminus. The G1Fc region may also comprise a mutation to an alanine at position 234 or a mutation to an alanine at position 235, or a combination thereof.

[0243] In certain aspects, the disclosure relates to a variant ActRIIB polypeptide comprising an amino acid sequence that is at least 75%, 80%, 85%, 90%, 91%, 92%, 93%, 94%, 95%, 96%, 97%, 98%, 99%, or 100% identical to the amino acid sequence of SEQ ID NO: 510. In some embodiments, the variant ActRIIB polypeptide comprises an arginine at the position corresponding to G68 of SEQ ID NO: 2. In some embodiments, the variant ActRIIB polypeptide comprises a glutamic acid at the position corresponding to L79 of SEQ ID NO: 2. In some embodiments, the variant ActRIIB polypeptide comprises a tyrosine at the position corresponding to F82 of SEQ ID NO: 2. In some embodiments, the variant ActRIIB polypeptide comprises an arginine at the position corresponding to N83 of SEQ ID NO: 2. In some embodiments, the variant ActRIIB polypeptide comprises an arginine at the position corresponding to G68 of SEQ ID NO: 2, a glutamic acid at the position corresponding to L79 of SEQ ID NO: 2, a tyrosine at the position corresponding to F82 of SEQ ID NO: 2, and an arginine at the position corresponding to N83 of SEQ ID NO: 2. In some embodiments, the amino acid sequence of SEQ ID NO: 510 may optionally be provided with the lysine removed from the C-terminus. The G1Fc region may also comprise a mutation to an alanine at position 234 or a mutation to an alanine at position 235, or a combination thereof.

[0244] In certain aspects, the disclosure relates to a variant ActRIIB polypeptide comprising an amino acid sequence that is at least 75%, 80%, 85%, 90%, 91%, 92%, 93%, 94%, 95%, 96%, 97%, 98%, 99%, or 100% identical to the amino acid sequence of SEQ ID NO: 512. In some embodiments, the variant ActRIIB polypeptide comprises an arginine at the position corresponding to G68 of SEQ ID NO: 2. In some embodiments, the variant ActRIIB polypeptide comprises a glutamic acid at the position corresponding to L79 of SEQ ID NO: 2. In some embodiments, the variant ActRIIB polypeptide comprises a tyrosine at the position corresponding to F82 of SEQ ID NO: 2. In some embodiments, the variant ActRIIB polypeptide comprises an arginine at the position corresponding to N83 of SEQ ID NO: 2. In some embodiments, the variant ActRIIB polypeptide comprises an arginine at the position corresponding to G68 of SEQ ID NO: 2, a glutamic acid at the position corresponding to L79 of SEQ ID NO: 2, a tyrosine at the position corresponding to F82 of SEQ ID NO: 2, and an arginine at the position corresponding to N83 of SEQ ID NO: 2. In some embodiments, the amino acid sequence of SEQ ID NO: 512 may optionally be provided with the lysine removed from the C-terminus. The G1Fc region may also comprise a mutation to an alanine at position 234 or a mutation to an alanine at position 235, or a combination thereof.

[0245] In certain aspects, the disclosure relates to a variant ActRIIB polypeptide comprising an amino acid sequence that is at least 75%, 80%, 85%, 90%, 91%, 92%, 93%, 94%, 95%, 96%, 97%, 98%, 99%, or 100% identical to the amino acid sequence of SEQ ID NO: 513. In some embodiments, the variant ActRIIB polypeptide comprises an arginine at the position corresponding to G68 of SEQ ID NO: 2. In some embodiments, the variant ActRIIB polypeptide comprises a threonine at the position corresponding to L79 of SEQ ID NO: 2. In some embodiments, the variant ActRIIB polypeptide comprises a threonine at the position corresponding to F82 of SEQ ID NO: 2. In some embodiments, the variant ActRIIB polypeptide comprises an arginine at the position corresponding to N83 of SEQ ID NO: 2. In some embodiments, the variant ActRIIB polypeptide comprises an arginine at the position corresponding to G68 of SEQ ID NO: 2, a threonine at the position corresponding to L79 of SEQ ID NO: 2, a threonine at the position corresponding to F82 of SEQ ID NO: 2, and an arginine at the position corresponding to N83 of SEQ ID NO: 2. In some embodiments, the amino acid sequence of SEQ ID NO: 513 may optionally be provided with the lysine removed from the C-terminus. The G1Fc region may also comprise a mutation to an alanine at position 234 or a mutation to an alanine at position 235, or a combination thereof.

[0246] In certain aspects, the disclosure relates to a variant ActRIIB polypeptide comprising an amino acid sequence that is at least 75%, 80%, 85%, 90%, 91%, 92%, 93%, 94%, 95%, 96%, 97%, 98%, 99%, or 100% identical to the amino acid sequence of SEQ ID NO: 515. In some embodiments, the variant ActRIIB polypeptide comprises an arginine at the position corresponding to G68 of SEQ ID NO: 2. In some embodiments, the variant ActRIIB polypeptide comprises a threonine at the position corresponding to L79 of SEQ ID NO: 2. In some embodiments, the variant ActRIIB polypeptide comprises a threonine at the position corresponding to F82 of SEQ ID NO: 2. In some embodiments, the variant ActRIIB polypeptide comprises an arginine at the position corresponding to N83 of SEQ ID NO: 2. In some embodiments, the variant ActRIIB polypeptide comprises an arginine at the position corresponding to G68 of SEQ ID NO: 2, a threonine at the position corresponding to L79 of SEQ ID NO: 2, a threonine at the position corresponding to F82 of SEQ ID NO: 2, and an arginine at the position corresponding to N83 of SEQ ID NO: 2. In some embodiments, the amino acid sequence of SEQ ID NO: 515 may optionally be provided with the lysine removed from the C-terminus. The G1Fc region may also comprise a mutation to an alanine at position 234 or a mutation to an alanine at position 235, or a combination thereof.

[0247] In some embodiments, variant ActRIIB-Fc proteins display varying ligand binding profiles compared to an Fc fusion protein comprising unmodified ActRIIB extracellular domain. Accordingly, in some embodiments of the present disclosure, variant ActRIIB proteins be more useful than unmodified ActRIIB in applications where such selective antagonism profiles are advantageous. For example, in some embodiments, it may be desirable to use an ActRIIB variant of the present disclosure to retain antagonism of one or more of activin A, activin B, GDF8, GDF11, BMP6, and/or BMP10, while reducing antagonism of BMP9.

[0248] In some embodiments, binding profiles of an ActRIIB variant of the present disclosure are varied from ligand binding profiles of an unmodified ActRIIB-Fc protein (e.g., WT). In some embodiments, a “significant reduction” in ligand binding as used herein refers to a decrease of over 30 times that of the WT. In certain embodiments, a “significant reduction” in ligand binding as used herein refers to a decrease so significant that binding is not detected. In some embodiments, a “modest reduction” in ligand binding as used herein refers to a decrease of between 10 and 30 times that of the WT. In some embodiments, a “minor reduction” in ligand binding as used herein refers to a decrease of between 3 and 10 times that of the WT. In some embodiments, a “near-WT level” in ligand binding as used herein refers to a decrease of between 3 times or less than that of the WT.

[0249] In some embodiments, an ActRIIB variant of the present disclosure displays a significant reduction in activin A binding, a significant reduction in GDF 11 binding, no detected BMP10 binding, a minor reduction in BMP6 binding, and a significant reduction in BMP9 binding, compared to binding profiles of an unmodified ActRIIB-Fc protein (e.g., WT). In some embodiments, an ActRIIB variant of the present disclosure displays near-WT levels of activin B binding, compared to binding profiles of an unmodified ActRIIB-Fc protein (e.g., WT). In some embodiments, an ActRIIB variant comprises a mutation at any one of positions E50, F82, and/or N83, wherein the variant displays a significant reduction in activin A binding, a significant reduction in GDF11 binding, no detected BMP10 binding, a minor reduction in BMP6 binding, and a significant reduction in BMP9 binding, compared to binding profiles of an unmodified ActRIIB-Fc protein (e.g., WT). In some embodiments, an ActRIIB variant comprises a mutation at any one of positions E50, F82, and/or N83, wherein the variant exhibits near-WT levels of activin B binding, compared to binding profiles of an unmodified ActRIIB-Fc protein (e.g., WT). In certain aspects, the disclosure relates to a variant ActRIIB polypeptide comprising an amino acid sequence that is at least 75%, 80%, 85%, 90%, 91%, 92%, 93%, 94%, 95%, 96%, 97%, 98%, 99%, or 100% identical to the amino acid sequence of SEQ ID NO: 437. In some embodiments, the variant ActRIIB polypeptide comprises an aspartic acid at the position corresponding to F82 of SEQ ID NO: 2. In some embodiments, the variant ActRIIB polypeptide comprises an arginine at the position corresponding to N83 of SEQ ID NO: 2. In some embodiments, the variant ActRIIB polypeptide comprises an aspartic acid at the position corresponding to F82 of SEQ ID NO: 2 and an arginine at the position corresponding to N83 of SEQ ID NO: 2. In some embodiments, the amino acid sequence of SEQ ID NO: 437 may optionally be provided with the lysine removed from the C-terminus. The G1Fc region may also comprise a mutation to an alanine at position 234 or a mutation to an alanine at position 235, or a combination thereof. In certain aspects, the disclosure relates to a variant ActRIIB polypeptide comprising an amino acid sequence that is at least 75%, 80%, 85%, 90%, 91%, 92%, 93%, 94%, 95%, 96%, 97%, 98%, 99%, or 100% identical to the amino acid sequence of SEQ ID NO: 452. In some embodiments, the variant ActRIIB polypeptide comprises a leucine at the position corresponding to E50 of SEQ ID NO: 2. In some embodiments, the variant ActRIIB polypeptide comprises an aspartic acid at the position corresponding to F82 of SEQ ID NO: 2. In some embodiments, the variant ActRIIB polypeptide comprises an arginine at the position corresponding to N83 of SEQ ID NO: 2. In some embodiments, the variant ActRIIB polypeptide comprises a leucine at the position corresponding to E50 of SEQ ID NO: 2, an aspartic acid at the position corresponding to F82 of SEQ ID NO: 2, and an arginine at the position corresponding to N83 of SEQ ID NO: 2. In some embodiments, the amino acid sequence of SEQ ID NO: 452 may optionally be provided with the lysine removed from the C-terminus. The G1Fc region may also comprise a mutation to an alanine at position 234 or a mutation to an alanine at position 235, or a combination thereof.

[0250] In some embodiments, an ActRIIB variant of the present disclosure displays a significant reduction in activin A binding, near-WT levels of GDF11 binding, near-WT levels of BMP10 binding, a slight increase in BMP6 binding, and a modest reduction in BMP9 binding, compared to binding profiles of an unmodified ActRIIB-Fc protein (e.g., WT). In some embodiments, an ActRIIB variant of the present disclosure displays near-WT levels of activin B binding, compared to binding profiles of an unmodified ActRIIB-Fc protein (e.g., WT). In some embodiments, an ActRIIB variant comprises a mutation at any one of positions L79 and/or F82, wherein the variant displays a significant reduction in activin A binding, near-WT levels of GDF11 binding, near-WT levels of BMP10 binding, a slight increase in BMP6 binding, and a modest reduction in BMP9 binding, compared to binding profiles of an unmodified ActRIIB-Fc protein (e.g., WT). In some embodiments, an ActRIIB variant comprises a mutation at any one of positions L79 and/or F82, wherein the variant exhibits near-WT levels of activin B binding, compared to binding profiles of an unmodified ActRIIB-Fc protein (e.g., WT). In certain aspects, the disclosure relates to a variant ActRIIB polypeptide comprising an amino acid sequence that is at least 75%, 80%, 85%, 90%, 91%, 92%, 93%, 94%, 95%, 96%, 97%, 98%, 99%, or 100% identical to the amino acid sequence of SEQ ID NO: 434. In some embodiments, the variant ActRIIB polypeptide comprises a phenylalanine at the position corresponding to L79 of SEQ ID NO: 2. In some embodiments, the variant ActRIIB polypeptide comprises a threonine at the position corresponding to F82 of SEQ ID NO: 2. In some embodiments, the variant ActRIIB polypeptide comprises a phenylalanine at the position corresponding to L79 of SEQ ID NO: 2 and a threonine at the position corresponding to F82 of SEQ ID NO: 2. In some embodiments, the amino acid sequence of SEQ ID NO: 434 may optionally be provided with the lysine removed from the C-terminus. The G1Fc region may also comprise a mutation to an alanine at position 234 or a mutation to an alanine at position 235, or a combination thereof.

[0251] In some embodiments, an ActRIIB variant of the present disclosure displays a significant reduction in activin A binding, near-WT levels of GDF11 binding, a minor reduction in BMP10 binding, near-WT levels of BMP6 binding, and a minor reduction in BMP9 binding, compared to binding profiles of an unmodified ActRIIB-Fc protein (e.g., WT). In some embodiments, an ActRIIB variant of the present disclosure displays near-WT levels of activin B binding, compared to binding profiles of an unmodified ActRIIB-Fc protein (e.g., WT). In some embodiments, an ActRIIB variant comprises a mutation at position L79, wherein the variant displays a significant reduction in activin A binding, near-WT levels of GDF11 binding, a minor reduction in BMP10 binding, near-WT levels of BMP6 binding, and a minor reduction in BMP9 binding, compared to binding profiles of an unmodified ActRIIB-Fc protein (e.g., WT). In some embodiments, an ActRIIB variant comprises a mutation at position L79, wherein the variant exhibits near-WT levels of activin B binding, compared to binding profiles of an unmodified ActRIIB-Fc protein (e.g., WT). In certain aspects, the disclosure relates to a variant ActRIIB polypeptide comprising an amino acid sequence that is at least 75%, 80%, 85%, 90%, 91%, 92%, 93%, 94%, 95%, 96%, 97%, 98%, 99%, or 100% identical to the amino acid sequence of SEQ ID NO: 392. In some embodiments, the variant ActRIIB polypeptide comprises a serine at the position corresponding to L79 of SEQ ID NO: 2. In some embodiments, the amino acid sequence of SEQ ID NO: 392 may optionally be provided with the lysine removed from the C-terminus. The G1Fc region may also comprise a mutation to an alanine at position 234 or a mutation to an alanine at position 235, or a combination thereof.

[0252] In some embodiments, an ActRIIB variant of the present disclosure displays a modest reduction in activin A binding, a significant reduction in GDF11 binding, no detectable BMP10 binding, a minor reduction in BMP6 binding, and a significant reduction in BMP9 binding, compared to binding profiles of an unmodified ActRIIB-Fc protein (e.g., WT). In some embodiments, an ActRIIB variant of the present disclosure displays near-WT levels of activin B binding, compared to binding profiles of an unmodified ActRIIB-Fc protein (e.g., WT). In some embodiments, an ActRIIB variant comprises a mutation at any one of positions L57, F82, and/or N83, wherein the variant displays a modest reduction in activin A binding, a significant reduction in GDF11 binding, no detectable BMP10 binding, a minor reduction in BMP6 binding, and a significant reduction in BMP9 binding, compared to binding profiles of an unmodified ActRIIB-Fc protein (e.g., WT). In some embodiments, an ActRIIB variant comprises a mutation at any one of positions L57, F82, and/or N83 wherein the variant exhibits near-WT levels of activin B binding, compared to binding profiles of an unmodified ActRIIB-Fc protein (e.g., WT). In certain aspects, the disclosure relates to a variant ActRIIB polypeptide comprising an amino acid sequence that is at least 75%, 80%, 85%, 90%, 91%, 92%, 93%, 94%, 95%, 96%, 97%, 98%, 99%, or 100% identical to the amino acid sequence of SEQ ID NO: 488. In some embodiments, the variant ActRIIB polypeptide comprises an arginine at the position corresponding to L57 of SEQ ID NO: 2. In some embodiments, the variant ActRIIB polypeptide comprises a leucine at the position corresponding to F82 of SEQ ID NO: 2. In some embodiments, the variant ActRIIB polypeptide comprises an arginine at the position corresponding to N83 of SEQ ID NO: 2. In some embodiments, the variant ActRIIB polypeptide comprises an arginine at the position corresponding to L57 of SEQ ID NO: 2, a leucine at the position corresponding to F82 of SEQ ID NO: 2, and an arginine at the position corresponding to N83 of SEQ ID NO: 2. In some embodiments, the amino acid sequence of SEQ ID NO: 488 may optionally be provided with the lysine removed from the C-terminus. The G1Fc region may also comprise a mutation to an alanine at position 234 or a mutation to an alanine at position 235, or a combination thereof.

[0253] In some embodiments, an ActRIIB variant of the present disclosure displays a modest reduction in activin A binding, a significant reduction in GDF 11 binding, no detectable BMP10 binding, a minor reduction in BMP6 binding, and a significant reduction in BMP9 binding, compared to binding profiles of an unmodified ActRIIB-Fc protein (e.g., WT). In some embodiments, an ActRIIB variant of the present disclosure displays a modest reduction in activin B binding, compared to binding profiles of an unmodified ActRIIB-Fc protein (e.g., WT). In some embodiments, an ActRIIB variant comprises a mutation at any one of positions L57, F82, and/or N83, wherein the variant displays a modest reduction in activin A binding, a significant reduction in GDF11 binding, no detectable BMP10 binding, a minor reduction in BMP6 binding, and a significant reduction in BMP9 binding, compared to binding profiles of an unmodified ActRIIB-Fc protein (e.g., WT). In some embodiments, an ActRIIB variant comprises a mutation at any one of positions L57, F82, and/or N83, wherein the variant exhibits a modest reduction in activin B binding, compared to binding profiles of an unmodified ActRIIB-Fc protein (e.g., WT). In certain aspects, the disclosure relates to a variant ActRIIB polypeptide comprising an amino acid sequence that is at least 75%, 80%, 85%, 90%, 91%, 92%, 93%, 94%, 95%, 96%, 97%, 98%, 99%, or 100% identical to the amino acid sequence of SEQ ID NO: 494. In some embodiments, the variant ActRIIB polypeptide comprises a valine at the position corresponding to L57 of SEQ ID NO: 2. In some embodiments, the variant ActRIIB polypeptide comprises an aspartic acid at the position corresponding to F82 of SEQ ID NO: 2. In some embodiments, the variant ActRIIB polypeptide comprises an arginine at the position corresponding to N83 of SEQ ID NO: 2. In some embodiments, the variant ActRIIB polypeptide comprises a valine at the position corresponding to L57 of SEQ ID NO: 2, an aspartic acid at the position corresponding to F82 of SEQ ID NO: 2, and an arginine at the position corresponding to N83 of SEQ ID NO: 2. In some embodiments, the amino acid sequence of SEQ ID NO: 494 may optionally be provided with the lysine removed from the C-terminus. The G1Fc region may also comprise a mutation to an alanine at position 234 or a mutation to an alanine at position 235, or a combination thereof.

[0254] In some embodiments, an ActRIIB variant of the present disclosure displays a modest reduction in activin A binding, a significant reduction in GDF11 binding, no detectable BMP10 binding, a significant reduction in BMP6 binding, and a significant reduction in BMP9 binding, compared to binding profiles of an unmodified ActRIIB-Fc protein (e.g., WT). In some embodiments, an ActRIIB variant of the present disclosure displays a modest reduction in activin B binding, compared to binding profiles of an unmodified ActRIIB-Fc protein (e.g., WT). In some embodiments, an ActRIIB variant comprises a mutation at any one of positions L57, F82, and/or N83, wherein the variant displays modest reduction in activin A binding, a significant reduction in GDF11 binding, no detectable BMP10 binding, a significant reduction in BMP6 binding, and a significant reduction in BMP9 binding, compared to binding profiles of an unmodified ActRIIB-Fc protein (e.g., WT). In some embodiments, an ActRIIB variant comprises a mutation at any one of positions L57, F82, and/or N83, wherein the variant exhibits a modest reduction in activin B binding, compared to binding profiles of an unmodified ActRIIB-Fc protein (e.g., WT). In certain aspects, the disclosure relates to a variant ActRIIB polypeptide comprising an amino acid sequence that is at least 75%, 80%, 85%, 90%, 91%, 92%, 93%, 94%, 95%, 96%, 97%, 98%, 99%, or 100% identical to the amino acid sequence of SEQ ID NO: 482. In some embodiments, the variant ActRIIB polypeptide comprises an arginine at the position corresponding to L57 of SEQ ID NO: 2. In some embodiments, the variant ActRIIB polypeptide comprises an aspartic acid at the position corresponding to F82 of SEQ ID NO: 2. In some embodiments, the variant ActRIIB polypeptide comprises an arginine at the position corresponding to N83 of SEQ ID NO: 2. In some embodiments, the variant ActRIIB polypeptide comprises an arginine at the position corresponding to L57 of SEQ ID NO: 2, an aspartic acid at the position corresponding to F82 of SEQ ID NO: 2, and an arginine at the position corresponding to N83 of SEQ ID NO: 2. In some embodiments, the amino acid sequence of SEQ ID NO: 482 may optionally be provided with the lysine removed from the C-terminus. The G1Fc region may also comprise a mutation to an alanine at position 234 or a mutation to an alanine at position 235, or a combination thereof. In certain aspects, the disclosure relates to a variant ActRIIB polypeptide comprising an amino acid sequence that is at least 75%, 80%, 85%, 90%, 91%, 92%, 93%, 94%, 95%, 96%, 97%, 98%, 99%, or 100% identical to the amino acid sequence of SEQ ID NO: 485. In some embodiments, the variant ActRIIB polypeptide comprises an arginine at the position corresponding to L57 of SEQ ID NO: 2. In some embodiments, the variant ActRIIB polypeptide comprises a glutamic acid at the position corresponding to F82 of SEQ ID NO: 2. In some embodiments, the variant ActRIIB polypeptide comprises an arginine at the position corresponding to N83 of SEQ ID NO: 2. In some embodiments, the variant ActRIIB polypeptide comprises an arginine at the position corresponding to L57 of SEQ ID NO: 2, a glutamic acid at the position corresponding to F82 of SEQ ID NO: 2, and an arginine at the position corresponding to N83 of SEQ ID NO: 2. In some embodiments, the amino acid sequence of SEQ ID NO: 485 may optionally be provided with the lysine removed from the C-terminus. The G1Fc region may also comprise a mutation to an alanine at position 234 or a mutation to an alanine at position 235, or a combination thereof.

[0255] In some embodiments, an ActRIIB variant of the present disclosure displays a modest reduction in activin A binding, a significant reduction in GDF 11 binding, no detectable BMP10 binding, a minor reduction in BMP6 binding, and a significant reduction in BMP9 binding, compared to binding profiles of an unmodified ActRIIB-Fc protein (e.g., WT). In some embodiments, an ActRIIB variant of the present disclosure displays near-WT levels of activin B binding, compared to binding profiles of an unmodified ActRIIB-Fc protein (e.g., WT). In some embodiments, an ActRIIB variant comprises a mutation at any one of positions E52, F82, and/or N83, wherein the variant displays a modest reduction in activin A binding, a significant reduction in GDF11 binding, no detectable BMP10 binding, a minor reduction in BMP6 binding, and a significant reduction in BMP9 binding, compared to binding profiles of an unmodified ActRIIB-Fc protein (e.g., WT). In some embodiments, an ActRIIB variant comprises a mutation at any one of positions E52, F82, and/or N83, wherein the variant exhibits near-WT levels of activin B binding, compared to binding profiles of an unmodified ActRIIB-Fc protein (e.g., WT). In certain aspects, the disclosure relates to a variant ActRIIB polypeptide comprising an amino acid sequence that is at least 75%, 80%, 85%, 90%, 91%, 92%, 93%, 94%, 95%, 96%, 97%, 98%, 99%, or 100% identical to the amino acid sequence of SEQ ID NO: 443. In some embodiments, the variant ActRIIB polypeptide comprises a serine at the position corresponding to F82 of SEQ ID NO: 2. In some embodiments, the variant ActRIIB polypeptide comprises an arginine at the position corresponding to N83 of SEQ ID NO: 2. In some embodiments, the variant ActRIIB polypeptide comprises a serine at the position corresponding to F82 of SEQ ID NO: 2 and an arginine at the position corresponding to N83 of SEQ ID NO: 2. In some embodiments, the amino acid sequence of SEQ ID NO: 443 may optionally be provided with the lysine removed from the C-terminus. The G1Fc region may also comprise a mutation to an alanine at position 234 or a mutation to an alanine at position 235, or a combination thereof. In certain aspects, the disclosure relates to a variant ActRIIB polypeptide comprising an amino acid sequence that is at least 75%, 80%, 85%, 90%, 91%, 92%, 93%, 94%, 95%, 96%, 97%, 98%, 99%, or 100% identical to the amino acid sequence of SEQ ID NO: 467. In some embodiments, the variant ActRIIB polypeptide comprises an asparagine at the position corresponding to E52 of SEQ ID NO: 2. In some embodiments, the variant ActRIIB polypeptide comprises a tyrosine at the position corresponding to F82 of SEQ ID NO: 2. In some embodiments, the variant ActRIIB polypeptide comprises an arginine at the position corresponding to N83 of SEQ ID NO: 2. In some embodiments, the variant ActRIIB polypeptide comprises an asparagine at the position corresponding to E52 of SEQ ID NO: 2, a tyrosine at the position corresponding to F82 of SEQ ID NO: 2, and an arginine at the position corresponding to N83 of SEQ ID NO: 2. In some embodiments, the amino acid sequence of SEQ ID NO: 467 may optionally be provided with the lysine removed from the C-terminus. The G1Fc region may also comprise a mutation to an alanine at position 234 or a mutation to an alanine at position 235, or a combination thereof.

[0256] In some embodiments, an ActRIIB variant of the present disclosure displays a modest reduction in activin A binding, a significant reduction in GDF11 binding, minimal BMP10 binding, a minor reduction in BMP6 binding, and a significant reduction in BMP9 binding, compared to binding profiles of an unmodified ActRIIB-Fc protein (e.g., WT). In some embodiments, an ActRIIB variant of the present disclosure displays near-WT levels of activin B binding, compared to binding profiles of an unmodified ActRIIB-Fc protein (e.g., WT). In some embodiments, an ActRIIB variant comprises a mutation at any one of positions L57, F82, and/or N83, wherein the variant displays a modest reduction in activin A binding, a significant reduction in GDF11 binding, minimal BMP10 binding, a minor reduction in BMP6 binding, and a significant reduction in BMP9 binding, compared to binding profiles of an unmodified ActRIIB-Fc protein (e.g., WT). In some embodiments, an ActRIIB variant comprises a mutation at any one of positions L57, F82, and/or N83, wherein the variant exhibits near-WT levels of activin B binding, compared to binding profiles of an unmodified ActRIIB-Fc protein (e.g., WT). In certain aspects, the disclosure relates to a variant ActRIIB polypeptide comprising an amino acid sequence that is at least 75%, 80%, 85%, 90%, 91%, 92%, 93%, 94%, 95%, 96%, 97%, 98%, 99%, or 100% identical to the amino acid sequence of SEQ ID NO: 491. In some embodiments, the variant ActRIIB polypeptide comprises a threonine at the position corresponding to L57 of SEQ ID NO: 2. In some embodiments, the variant ActRIIB polypeptide comprises a tyrosine at the position corresponding to F82 of SEQ ID NO: 2. In some embodiments, the variant ActRIIB polypeptide comprises an arginine at the position corresponding to N83 of SEQ ID NO: 2. In some embodiments, the variant ActRIIB polypeptide comprises a threonine at the position corresponding to L57 of SEQ ID NO: 2, a tyrosine at the position corresponding to F82 of SEQ ID NO: 2, and an arginine at the position corresponding to N83 of SEQ ID NO: 2. In some embodiments, the amino acid sequence of SEQ ID NO: 491 may optionally be provided with the lysine removed from the C-terminus. The G1Fc region may also comprise a mutation to an alanine at position 234 or a mutation to an alanine at position 235, or a combination thereof.

[0257] In some embodiments, an ActRIIB variant of the present disclosure displays a modest reduction in activin A binding, a significant reduction in GDF11 binding, minimal BMP10 binding, a minor reduction in BMP6 binding, and a significant reduction in BMP9 binding, compared to binding profiles of an unmodified ActRIIB-Fc protein (e.g., WT). In some embodiments, an ActRIIB variant of the present disclosure displays a modest reduction in activin B binding, compared to binding profiles of an unmodified ActRIIB-Fc protein (e.g., WT). In some embodiments, an ActRIIB variant comprises a mutation at any one of positions E52, F82, and/or N83, wherein the variant displays a modest reduction in activin A binding, a significant reduction in GDF11 binding, minimal BMP10 binding, a minor reduction in BMP6 binding, and a significant reduction in BMP9 binding, compared to binding profiles of an unmodified ActRIIB-Fc protein (e.g., WT). In some embodiments, an ActRIIB variant comprises a mutation at any one of positions E52, F82, and/or N83, wherein the variant exhibits a modest reduction in activin B binding, compared to binding profiles of an unmodified ActRIIB-Fc protein (e.g., WT). In certain aspects, the disclosure relates to a variant ActRIIB polypeptide comprising an amino acid sequence that is at least 75%, 80%, 85%, 90%, 91%, 92%, 93%, 94%, 95%, 96%, 97%, 98%, 99%, or 100% identical to the amino acid sequence of SEQ ID NO: 455. In some embodiments, the variant ActRIIB polypeptide comprises an aspartic acid at the position corresponding to E52 of SEQ ID NO: 2. In some embodiments, the variant ActRIIB polypeptide comprises an aspartic acid at the position corresponding to F82 of SEQ ID NO: 2. In some embodiments, the variant ActRIIB polypeptide comprises an arginine at the position corresponding to N83 of SEQ ID NO: 2. In some embodiments, the variant ActRIIB polypeptide comprises an aspartic acid at the position corresponding to E52 of SEQ ID NO: 2, an aspartic acid at the position corresponding to F82 of SEQ ID NO: 2, and an arginine at the position corresponding to N83 of SEQ ID NO: 2. In some embodiments, the amino acid sequence of SEQ ID NO: 455 may optionally be provided with the lysine removed from the C-terminus. The G1Fc region may also comprise a mutation to an alanine at position 234 or a mutation to an alanine at position 235, or a combination thereof.

[0258] In some embodiments, an ActRIIB variant of the present disclosure displays a modest reduction in activin A binding, a significant reduction in GDF11 binding, minimal BMP10 binding, a modest reduction in BMP6 binding, and a significant reduction in BMP9 binding, compared to binding profiles of an unmodified ActRIIB-Fc protein (e.g., WT). In some embodiments, an ActRIIB variant of the present disclosure displays a modest reduction in activin B binding, compared to binding profiles of an unmodified ActRIIB-Fc protein (e.g., WT). In some embodiments, an ActRIIB variant comprises a mutation at any one of positions L57, F82, and/or N83, wherein the variant displays a modest reduction in activin A binding, a significant reduction in GDF11 binding, minimal BMP10 binding, a modest reduction in BMP6 binding, and a significant reduction in BMP9 binding, compared to binding profiles of an unmodified ActRIIB-Fc protein (e.g., WT). In some embodiments, an ActRIIB variant comprises a mutation at any one of positions L57, F82, and/or N83, wherein the variant exhibits a modest reduction in activin B binding, compared to binding profiles of an unmodified ActRIIB-Fc protein (e.g., WT). In certain aspects, the disclosure relates to a variant ActRIIB polypeptide comprising an amino acid sequence that is at least 75%, 80%, 85%, 90%, 91%, 92%, 93%, 94%, 95%, 96%, 97%, 98%, 99%, or 100% identical to the amino acid sequence of SEQ ID NO: 476. In some embodiments, the variant ActRIIB polypeptide comprises an isoleucine at the position corresponding to L57 of SEQ ID NO: 2. In some embodiments, the variant ActRIIB polypeptide comprises an aspartic acid at the position corresponding to F82 of SEQ ID NO: 2. In some embodiments, the variant ActRIIB polypeptide comprises an arginine at the position corresponding to N83 of SEQ ID NO: 2. In some embodiments, the variant ActRIIB polypeptide comprises an isoleucine at the position corresponding to L57 of SEQ ID NO: 2, an aspartic acid at the position corresponding to F82 of SEQ ID NO: 2, and an arginine at the position corresponding to N83 of SEQ ID NO: 2. In some embodiments, the amino acid sequence of SEQ ID NO: 476 may optionally be provided with the lysine removed from the C-terminus. The G1Fc region may also comprise a mutation to an alanine at position 234 or a mutation to an alanine at position 235, or a combination thereof.

[0259] In some embodiments, an ActRIIB variant of the present disclosure displays a modest reduction in activin A binding, a significant reduction in GDF11 binding, a modest reduction in BMP10 binding, a minor reduction in BMP6 binding, and a significant reduction in BMP9 binding, compared to binding profiles of an unmodified ActRIIB-Fc protein (e.g., WT). In some embodiments, an ActRIIB variant of the present disclosure displays near-WT levels of activin B binding, compared to binding profiles of an unmodified ActRIIB-Fc protein (e.g., WT). In some embodiments, an ActRIIB variant comprises a mutation at any one of positions E52, F82, and/or N83, wherein the variant displays a modest reduction in activin A binding, a significant reduction in GDF11 binding, a modest reduction in BMP10 binding, a minor reduction in BMP6 binding, and a significant reduction in BMP9 binding, compared to binding profiles of an unmodified ActRIIB-Fc protein (e.g., WT). In some embodiments, an ActRIIB variant comprises a mutation at any one of positions E52, F82, and/or N83, wherein the variant exhibits near-WT levels of activin B binding, compared to binding profiles of an unmodified ActRIIB-Fc protein (e.g., WT). In certain aspects, the disclosure relates to a variant ActRIIB polypeptide comprising an amino acid sequence that is at least 75%, 80%, 85%, 90%, 91%, 92%, 93%, 94%, 95%, 96%, 97%, 98%, 99%, or 100% identical to the amino acid sequence of SEQ ID NO: 461. In some embodiments, the variant ActRIIB polypeptide comprises an aspartic acid at the position corresponding to E52 of SEQ ID NO: 2. In some embodiments, the variant ActRIIB polypeptide comprises a threonine at the position corresponding to F82 of SEQ ID NO: 2. In some embodiments, the variant ActRIIB polypeptide comprises an arginine at the position corresponding to N83 of SEQ ID NO: 2. In some embodiments, the variant ActRIIB polypeptide comprises an aspartic acid at the position corresponding to E52 of SEQ ID NO: 2, a threonine at the position corresponding to F82 of SEQ ID NO: 2, and an arginine at the position corresponding to N83 of SEQ ID NO: 2. In some embodiments, the amino acid sequence of SEQ ID NO: 461 may optionally be provided with the lysine removed from the C-terminus. The G1Fc region may also comprise a mutation to an alanine at position 234 or a mutation to an alanine at position 235, or a combination thereof.

[0260] In some embodiments, an ActRIIB variant of the present disclosure displays a modest reduction in activin A binding, a significant reduction in GDF11 binding, a modest reduction in BMP10 binding, minimal BMP6 binding, and a significant reduction in BMP9 binding, compared to binding profiles of an unmodified ActRIIB-Fc protein (e.g., WT). In some embodiments, an ActRIIB variant of the present disclosure displays near-WT levels of activin B binding, compared to binding profiles of an unmodified ActRIIB-Fc protein (e.g., WT). In some embodiments, an ActRIIB variant comprises a mutation at any one of positions E52, F82, and/or N83, wherein the variant displays a modest reduction in activin A binding, a significant reduction in GDF11 binding, a modest reduction in BMP10 binding, minimal BMP6 binding, and a significant reduction in BMP9 binding, compared to binding profiles of an unmodified ActRIIB-Fc protein (e.g., WT). In some embodiments, an ActRIIB variant comprises a mutation at any one of positions E52, F82, and/or N83, wherein the variant exhibits near-WT levels of activin B binding, compared to binding profiles of an unmodified ActRIIB-Fc protein (e.g., WT). In certain aspects, the disclosure relates to a variant ActRIIB polypeptide comprising an amino acid sequence that is at least 75%, 80%, 85%, 90%, 91%, 92%, 93%, 94%, 95%, 96%, 97%, 98%, 99%, or 100% identical to the amino acid sequence of SEQ ID NO: 464. In some embodiments, the variant ActRIIB polypeptide comprises an asparagine at the position corresponding to E52 of SEQ ID NO: 2. In some embodiments, the variant ActRIIB polypeptide comprises an isoleucine at the position corresponding to F82 of SEQ ID NO: 2. In some embodiments, the variant ActRIIB polypeptide comprises an arginine at the position corresponding to N83 of SEQ ID NO: 2. In some embodiments, the variant ActRIIB polypeptide comprises an asparagine at the position corresponding to E52 of SEQ ID NO: 2, an isoleucine at the position corresponding to F82 of SEQ ID NO: 2, and an arginine at the position corresponding to N83 of SEQ ID NO: 2. In some embodiments, the amino acid sequence of SEQ ID NO: 464 may optionally be provided with the lysine removed from the C-terminus. The G1Fc region may also comprise a mutation to an alanine at position 234 or a mutation to an alanine at position 235, or a combination thereof.

[0261] In some embodiments, an ActRIIB variant of the present disclosure displays a modest reduction in activin A binding, a significant reduction in GDF11 binding, a modest reduction in BMP10 binding, minimal BMP6 binding, and a modest reduction in BMP9 binding, compared to binding profiles of an unmodified ActRIIB-Fc protein (e.g., WT). In some embodiments, an ActRIIB variant of the present disclosure displays a modest reduction in activin B binding, compared to binding profiles of an unmodified ActRIIB-Fc protein (e.g., WT). In some embodiments, an ActRIIB variant comprises a mutation at any one of positions E52, F82, and/or N83, wherein the variant displays a modest reduction in activin A binding, a significant reduction in GDF11 binding, a modest reduction in BMP10 binding, minimal BMP6 binding, and a modest reduction in BMP9 binding, compared to binding profiles of an unmodified ActRIIB-Fc protein (e.g., WT). In some embodiments, an ActRIIB variant comprises a mutation at any one of positions E52, F82, and/or N83, wherein the variant exhibits a modest reduction in activin B binding, compared to binding profiles of an unmodified ActRIIB-Fc protein (e.g., WT). In certain aspects, the disclosure relates to a variant ActRIIB polypeptide comprising an amino acid sequence that is at least 75%, 80%, 85%, 90%, 91%, 92%, 93%, 94%, 95%, 96%, 97%, 98%, 99%, or 100% identical to the amino acid sequence of SEQ ID NO: 470. In some embodiments, the variant ActRIIB polypeptide comprises a tyrosine at the position corresponding to E52 of SEQ ID NO: 2. In some embodiments, the variant ActRIIB polypeptide comprises an aspartic acid at the position corresponding to F82 of SEQ ID NO: 2. In some embodiments, the variant ActRIIB polypeptide comprises an arginine at the position corresponding to N83 of SEQ ID NO: 2. In some embodiments, the variant ActRIIB polypeptide comprises a tyrosine at the position corresponding to E52 of SEQ ID NO: 2, an aspartic acid at the position corresponding to F82 of SEQ ID NO: 2, and an arginine at the position corresponding to N83 of SEQ ID NO: 2. In some embodiments, the amino acid sequence of SEQ ID NO: 470 may optionally be provided with the lysine removed from the C-terminus. The G1Fc region may also comprise a mutation to an alanine at position 234 or a mutation to an alanine at position 235, or a combination thereof.

[0262] In some embodiments, an ActRIIB variant of the present disclosure displays a modest reduction in activin A binding, a modest reduction in GDF11 binding, no detectable BMP10 binding, a minor reduction in BMP6 binding, and a significant reduction in BMP9 binding, compared to binding profiles of an unmodified ActRIIB-Fc protein (e.g., WT). In some embodiments, an ActRIIB variant of the present disclosure displays a minor reduction in activin B binding, compared to binding profiles of an unmodified ActRIIB-Fc protein (e.g., WT). In some embodiments, an ActRIIB variant comprises a mutation at any one of positions E52, L57, F82, and/or N83, wherein the variant displays a modest reduction in activin A binding, a modest reduction in GDF11 binding, no detectable BMP10 binding, a minor reduction in BMP6 binding, and a significant reduction in BMP9 binding, compared to binding profiles of an unmodified ActRIIB-Fc protein (e.g., WT). In some embodiments, an ActRIIB variant comprises a mutation at any one of positions E52, L57, F82, and/or N83, wherein the variant exhibits a minor reduction in activin B binding, compared to binding profiles of an unmodified ActRIIB-Fc protein (e.g., WT). In certain aspects, the disclosure relates to a variant ActRIIB polypeptide comprising an amino acid sequence that is at least 75%, 80%, 85%, 90%, 91%, 92%, 93%, 94%, 95%, 96%, 97%, 98%, 99%, or 100% identical to the amino acid sequence of SEQ ID NO: 440. In some embodiments, the variant ActRIIB polypeptide comprises a glutamic acid at the position corresponding to F82 of SEQ ID NO: 2. In some embodiments, the variant ActRIIB polypeptide comprises an arginine at the position corresponding to N83 of SEQ ID NO: 2. In some embodiments, the variant ActRIIB polypeptide comprises a glutamic acid at the position corresponding to F82 of SEQ ID NO: 2 and an arginine at the position corresponding to N83 of SEQ ID NO: 2. In some embodiments, the amino acid sequence of SEQ ID NO: 440 may optionally be provided with the lysine removed from the C-terminus. The G1Fc region may also comprise a mutation to an alanine at position 234 or a mutation to an alanine at position 235, or a combination thereof. In certain aspects, the disclosure relates to a variant ActRIIB polypeptide comprising an amino acid sequence that is at least 75%, 80%, 85%, 90%, 91%, 92%, 93%, 94%, 95%, 96%, 97%, 98%, 99%, or 100% identical to the amino acid sequence of SEQ ID NO: 458. In some embodiments, the variant ActRIIB polypeptide comprises an aspartic acid at the position corresponding to E52 of SEQ ID NO: 2. In some embodiments, the variant ActRIIB polypeptide comprises a glutamic acid at the position corresponding to F82 of SEQ ID NO: 2. In some embodiments, the variant ActRIIB polypeptide comprises an arginine at the position corresponding to N83 of SEQ ID NO: 2. In some embodiments, the variant ActRIIB polypeptide comprises an aspartic acid at the position corresponding to E52 of SEQ ID NO: 2, a glutamic acid at the position corresponding to F82 of SEQ ID NO: 2, and an arginine at the position corresponding to N83 of SEQ ID NO: 2. In some embodiments, the amino acid sequence of SEQ ID NO: 458 may optionally be provided with the lysine removed from the C-terminus. The G1Fc region may also comprise a mutation to an alanine at position 234 or a mutation to an alanine at position 235, or a combination thereof. In certain aspects, the disclosure relates to a variant ActRIIB polypeptide comprising an amino acid sequence that is at least 75%, 80%, 85%, 90%, 91%, 92%, 93%, 94%, 95%, 96%, 97%, 98%, 99%, or 100% identical to the amino acid sequence of SEQ ID NO: 479. In some embodiments, the variant ActRIIB polypeptide comprises an isoleucine at the position corresponding to L57 of SEQ ID NO: 2. In some embodiments, the variant ActRIIB polypeptide comprises a glutamic acid at the position corresponding to F82 of SEQ ID NO: 2. In some embodiments, the variant ActRIIB polypeptide comprises an arginine at the position corresponding to N83 of SEQ ID NO: 2. In some embodiments, the variant ActRIIB polypeptide comprises an isoleucine at the position corresponding to L57 of SEQ ID NO: 2, a glutamic acid at the position corresponding to F82 of SEQ ID NO: 2, and an arginine at the position corresponding to N83 of SEQ ID NO: 2. In some embodiments, the amino acid sequence of SEQ ID NO: 479 may optionally be provided with the lysine removed from the C-terminus. The G1Fc region may also comprise a mutation to an alanine at position 234 or a mutation to an alanine at position 235, or a combination thereof. In certain aspects, the disclosure relates to a variant ActRIIB polypeptide comprising an amino acid sequence that is at least 75%, 80%, 85%, 90%, 91%, 92%, 93%, 94%, 95%, 96%, 97%, 98%, 99%, or 100% identical to the amino acid sequence of SEQ ID NO: 473. In some embodiments, the variant ActRIIB polypeptide comprises a glutamic acid at the position corresponding to L57 of SEQ ID NO: 2. In some embodiments, the variant ActRIIB polypeptide comprises a glutamic acid at the position corresponding to F82 of SEQ ID NO: 2. In some embodiments, the variant ActRIIB polypeptide comprises an arginine at the position corresponding to N83 of SEQ ID NO: 2. In some embodiments, the variant ActRIIB polypeptide comprises a glutamic acid at the position corresponding to L57 of SEQ ID NO: 2, a glutamic acid at the position corresponding to F82 of SEQ ID NO: 2, and an arginine at the position corresponding to N83 of SEQ ID NO: 2. In some embodiments, the amino acid sequence of SEQ ID NO: 473 may optionally be provided with the lysine removed from the C-terminus. The G1Fc region may also comprise a mutation to an alanine at position 234 or a mutation to an alanine at position 235, or a combination thereof.

[0263] In some embodiments, an ActRIIB variant of the present disclosure displays a modest reduction in activin A binding, near-WT levels of GDF11 binding, near-WT levels of BMP10 binding, a slight increase in BMP6 binding, and near-WT levels of BMP9 binding, compared to binding profiles of an unmodified ActRIIB-Fc protein (e.g., WT). In some embodiments, an ActRIIB variant of the present disclosure displays near-WT levels of activin B binding, compared to binding profiles of an unmodified ActRIIB-Fc protein (e.g., WT). In some embodiments, an ActRIIB variant comprises a mutation at position L79, wherein the variant displays a modest reduction in activin A binding, near-WT levels of GDF11 binding, near-WT levels of BMP10 binding, a slight increase in BMP6 binding, and near-WT levels of BMP9 binding, compared to binding profiles of an unmodified ActRIIB-Fc protein (e.g., WT). In some embodiments, an ActRIIB variant comprises a mutation at position L79, wherein the variant exhibits near-WT levels of activin B binding, compared to binding profiles of an unmodified ActRIIB-Fc protein (e.g., WT). In certain aspects, the disclosure relates to a variant ActRIIB polypeptide comprising an amino acid sequence that is at least 75%, 80%, 85%, 90%, 91%, 92%, 93%, 94%, 95%, 96%, 97%, 98%, 99%, or 100% identical to the amino acid sequence of SEQ ID NO: 395. In some embodiments, the variant ActRIIB polypeptide comprises a tryptophan at the position corresponding to L79 of SEQ ID NO: 2. In some embodiments, the amino acid sequence of SEQ ID NO: 395 may optionally be provided with the lysine removed from the C-terminus. The G1Fc region may also comprise a mutation to an alanine at position 234 or a mutation to an alanine at position 235, or a combination thereof.

[0264] In some embodiments, an ActRIIB variant of the present disclosure displays a modest reduction in activin A binding, near-WT levels of GDF11 binding, near-WT levels of BMP10 binding, a slight increase in BMP6 binding, and near-WT levels of BMP9 binding, compared to binding profiles of an unmodified ActRIIB-Fc protein (e.g., WT). In some embodiments, an ActRIIB variant of the present disclosure displays a modest reduction in activin B binding, compared to binding profiles of an unmodified ActRIIB-Fc protein (e.g., WT). In some embodiments, an ActRIIB variant comprises a mutation at any one of positions L79, and/or F82, wherein the variant displays a modest reduction in activin A binding, near-WT levels of GDF11 binding, near-WT levels of BMP10 binding, a slight increase in BMP6 binding, and near-WT levels of BMP9 binding, compared to binding profiles of an unmodified ActRIIB-Fc protein (e.g., WT). In some embodiments, an ActRIIB variant comprises a mutation at any one of positions L79, and/or F82, wherein the variant exhibits a modest reduction in activin B binding, compared to binding profiles of an unmodified ActRIIB-Fc protein (e.g., WT). In certain aspects, the disclosure relates to a variant ActRIIB polypeptide comprising an amino acid sequence that is at least 75%, 80%, 85%, 90%, 91%, 92%, 93%, 94%, 95%, 96%, 97%, 98%, 99%, or 100% identical to the amino acid sequence of SEQ ID NO: 431. In some embodiments, the variant ActRIIB polypeptide comprises a phenylalanine at the position corresponding to L79 of SEQ ID NO: 2. In some embodiments, the variant ActRIIB polypeptide comprises an aspartic acid at the position corresponding to F82 of SEQ ID NO: 2. In some embodiments, the variant ActRIIB polypeptide comprises a phenylalanine at the position corresponding to L79 of SEQ ID NO: 2 and an aspartic acid at the position corresponding to F82 of SEQ ID NO: 2. In some embodiments, the amino acid sequence of SEQ ID NO: 431 may optionally be provided with the lysine removed from the C-terminus. The G1Fc region may also comprise a mutation to an alanine at position 234 or a mutation to an alanine at position 235, or a combination thereof.

[0265] In some embodiments, an ActRIIB variant of the present disclosure displays a minor reduction in activin A binding, a modest reduction in GDF11 binding, a modest reduction in BMP10 binding, a significant reduction in BMP6 binding, and a significant reduction in BMP9 binding, compared to binding profiles of an unmodified ActRIIB-Fc protein (e.g., WT). In some embodiments, an ActRIIB variant of the present disclosure displays near-WT levels of activin B binding, compared to binding profiles of an unmodified ActRIIB-Fc protein (e.g., WT). In some embodiments, an ActRIIB variant comprises a mutation at any one of positions L57, F82, and/or N83, wherein the variant displays a minor reduction in activin A binding, a modest reduction in GDF11 binding, a modest reduction in BMP10 binding, a significant reduction in BMP6 binding, and a significant reduction in BMP9 binding, compared to binding profiles of an unmodified ActRIIB-Fc protein (e.g., WT). In some embodiments, an ActRIIB variant comprises a mutation at any one of positions L57, F82, and/or N83, wherein the variant exhibits near-WT levels of activin B binding, compared to binding profiles of an unmodified ActRIIB-Fc protein (e.g., WT). In certain aspects, the disclosure relates to a variant ActRIIB polypeptide comprising an amino acid sequence that is at least 75%, 80%, 85%, 90%, 91%, 92%, 93%, 94%, 95%, 96%, 97%, 98%, 99%, or 100% identical to the amino acid sequence of SEQ ID NO: 497. In some embodiments, the variant ActRIIB polypeptide comprises a valine at the position corresponding to L57 of SEQ ID NO: 2. In some embodiments, the variant ActRIIB polypeptide comprises a tyrosine at the position corresponding to F82 of SEQ ID NO: 2. In some embodiments, the variant ActRIIB polypeptide comprises an arginine at the position corresponding to N83 of SEQ ID NO: 2. In some embodiments, the variant ActRIIB polypeptide comprises a valine at the position corresponding to L57 of SEQ ID NO: 2, a tyrosine at the position corresponding to F82 of SEQ ID NO: 2, and an arginine at the position corresponding to N83 of SEQ ID NO: 2. In some embodiments, the amino acid sequence of SEQ ID NO: 497 may optionally be provided with the lysine removed from the C-terminus. The G1Fc region may also comprise a mutation to an alanine at position 234 or a mutation to an alanine at position 235, or a combination thereof.

[0266] In some embodiments, an ActRIIB variant of the present disclosure displays near-WT levels of activin A binding, near-WT levels of GDF11 binding, a modest reduction in BMP10 binding, a modest reduction in BMP6 binding, and a modest reduction in BMP9 binding, compared to binding profiles of an unmodified ActRIIB-Fc protein (e.g., WT). In some embodiments, an ActRIIB variant of the present disclosure displays a minor reduction in activin B binding, compared to binding profiles of an unmodified ActRIIB-Fc protein (e.g., WT). In some embodiments, an ActRIIB variant comprises a mutation at any one of positions L57, and/or F82, wherein the variant displays near-WT levels of activin A binding, near-WT levels of GDF11 binding, a modest reduction in BMP10 binding, a modest reduction in BMP6 binding, and a modest reduction in BMP9 binding, compared to binding profiles of an unmodified ActRIIB-Fc protein (e.g., WT). In some embodiments, an ActRIIB variant comprises a mutation at any one of positions L57, and/or F82, wherein the variant exhibits a minor reduction in activin B binding, compared to binding profiles of an unmodified ActRIIB-Fc protein (e.g., WT). In certain aspects, the disclosure relates to a variant ActRIIB polypeptide comprising an amino acid sequence that is at least 75%, 80%, 85%, 90%, 91%, 92%, 93%, 94%, 95%, 96%, 97%, 98%, 99%, or 100% identical to the amino acid sequence of SEQ ID NO: 422. In some embodiments, the variant ActRIIB polypeptide comprises an arginine at the position corresponding to L57 of SEQ ID NO: 2. In some embodiments, the variant ActRIIB polypeptide comprises an aspartic acid at the position corresponding to F82 of SEQ ID NO: 2. In some embodiments, the variant ActRIIB polypeptide comprises an arginine at the position corresponding to L57 of SEQ ID NO: 2 and an aspartic acid at the position corresponding to F82 of SEQ ID NO: 2. In some embodiments, the amino acid sequence of SEQ ID NO: 422 may optionally be provided with the lysine removed from the C-terminus. The G1Fc region may also comprise a mutation to an alanine at position 234 or a mutation to an alanine at position 235, or a combination thereof.

[0267] In some embodiments, an ActRIIB variant of the present disclosure displays near-WT levels of activin A binding, near-WT levels of GDF11 binding, near-WT levels of BMP10 binding, a minimal binding to BMP6, and a minor reduction in BMP9 binding, compared to binding profiles of an unmodified ActRIIB-Fc protein (e.g., WT). In some embodiments, an ActRIIB variant of the present disclosure displays near-WT levels of activin B binding, compared to binding profiles of an unmodified ActRIIB-Fc protein (e.g., WT). In some embodiments, an ActRIIB variant comprises a mutation at position E94, wherein the variant displays near-WT levels of activin A binding, near-WT levels of GDF11 binding, near-WT levels of BMP10 binding, a minimal binding to BMP6, and a minor reduction in BMP9 binding, compared to binding profiles of an unmodified ActRIIB-Fc protein (e.g., WT). In some embodiments, an ActRIIB variant comprises a mutation at position E94, wherein the variant exhibits near-WT levels of activin B binding, compared to binding profiles of an unmodified ActRIIB-Fc protein (e.g., WT). In certain aspects, the disclosure relates to a variant ActRIIB polypeptide comprising an amino acid sequence that is at least 75%, 80%, 85%, 90%, 91%, 92%, 93%, 94%, 95%, 96%, 97%, 98%, 99%, or 100% identical to the amino acid sequence of SEQ ID NO: 413. In some embodiments, the variant ActRIIB polypeptide comprises a lysine at the position corresponding to E94 of SEQ ID NO: 2. In some embodiments, the amino acid sequence of SEQ ID NO: 413 may optionally be provided with the lysine removed from the C-terminus. The G1Fc region may also comprise a mutation to an alanine at position 234 or a mutation to an alanine at position 235, or a combination thereof.

[0268] In some embodiments, an ActRIIB variant of the present disclosure displays near-WT levels of activin A binding, near-WT levels of GDF11 binding, near-WT levels of BMP10 binding, near-WT levels of BMP6 binding, and a minor reduction in BMP9 binding, compared to binding profiles of an unmodified ActRIIB-Fc protein (e.g., WT). In some embodiments, an ActRIIB variant of the present disclosure displays near-WT levels of activin B binding, compared to binding profiles of an unmodified ActRIIB-Fc protein (e.g., WT). In some embodiments, an ActRIIB variant comprises a mutation at any one of positions E52 and/or F82, wherein the variant displays near-WT levels of activin A binding, near-WT levels of GDF11 binding, near-WT levels of BMP10 binding, near-WT levels of BMP6 binding, and a minor reduction in BMP9 binding, compared to binding profiles of an unmodified ActRIIB-Fc protein (e.g., WT). In some embodiments, an ActRIIB variant comprises a mutation at any one of positions E52 and/or F82, wherein the variant exhibits near-WT levels of activin B binding, compared to binding profiles of an unmodified ActRIIB-Fc protein (e.g., WT). In certain aspects, the disclosure relates to a variant ActRIIB polypeptide comprising an amino acid sequence that is at least 75%, 80%, 85%, 90%, 91%, 92%, 93%, 94%, 95%, 96%, 97%, 98%, 99%, or 100% identical to the amino acid sequence of SEQ ID NO: 398. In some embodiments, the variant ActRIIB polypeptide comprises an aspartic acid at the position corresponding to F82 of SEQ ID NO: 2. In some embodiments, the amino acid sequence of SEQ ID NO: 398 may optionally be provided with the lysine removed from the C-terminus. The G1Fc region may also comprise a mutation to an alanine at position 234 or a mutation to an alanine at position 235, or a combination thereof. In certain aspects, the disclosure relates to a variant ActRIIB polypeptide comprising an amino acid sequence that is at least 75%, 80%, 85%, 90%, 91%, 92%, 93%, 94%, 95%, 96%, 97%, 98%, 99%, or 100% identical to the amino acid sequence of SEQ ID NO: 401. In some embodiments, the variant ActRIIB polypeptide comprises a glutamic acid at the position corresponding to F82 of SEQ ID NO: 2. In some embodiments, the amino acid sequence of SEQ ID NO: 401 may optionally be provided with the lysine removed from the C-terminus. The G1Fc region may also comprise a mutation to an alanine at position 234 or a mutation to an alanine at position 235, or a combination thereof. In certain aspects, the disclosure relates to a variant ActRIIB polypeptide comprising an amino acid sequence that is at least 75%, 80%, 85%, 90%, 91%, 92%, 93%, 94%, 95%, 96%, 97%, 98%, 99%, or 100% identical to the amino acid sequence of SEQ ID NO: 407. In some embodiments, the variant ActRIIB polypeptide comprises a serine at the position corresponding to F82 of SEQ ID NO: 2. In some embodiments, the amino acid sequence of SEQ ID NO: 407 may optionally be provided with the lysine removed from the C-terminus. The G1Fc region may also comprise a mutation to an alanine at position 234 or a mutation to an alanine at position 235, or a combination thereof. In certain aspects, the disclosure relates to a variant ActRIIB polypeptide comprising an amino acid sequence that is at least 75%, 80%, 85%, 90%, 91%, 92%, 93%, 94%, 95%, 96%, 97%, 98%, 99%, or 100% identical to the amino acid sequence of SEQ ID NO: 404. In some embodiments, the variant ActRIIB polypeptide comprises an leucine at the position corresponding to F82 of SEQ ID NO: 2. In some embodiments, the amino acid sequence of SEQ ID NO: 404 may optionally be provided with the lysine removed from the C-terminus. The G1Fc region may also comprise a mutation to an alanine at position 234 or a mutation to an alanine at position 235, or a combination thereof. In certain aspects, the disclosure relates to a variant ActRIIB polypeptide comprising an amino acid sequence that is at least 75%, 80%, 85%, 90%, 91%, 92%, 93%, 94%, 95%, 96%, 97%, 98%, 99%, or 100% identical to the amino acid sequence of SEQ ID NO: 419. In some embodiments, the variant ActRIIB polypeptide comprises an aspartic acid at the position corresponding to E52 of SEQ ID NO: 2. In some embodiments, the variant ActRIIB polypeptide comprises a threonine at the position corresponding to F82 of SEQ ID NO: 2. In some embodiments, the variant ActRIIB polypeptide comprises an aspartic acid at the position corresponding to E52 of SEQ ID NO: 2 and a threonine at the position corresponding to F82 of SEQ ID NO: 2. In some embodiments, the amino acid sequence of SEQ ID NO: 419 may optionally be provided with the lysine removed from the C-terminus. The G1Fc region may also comprise a mutation to an alanine at position 234 or a mutation to an alanine at position 235, or a combination thereof.

[0269] In some embodiments, an ActRIIB variant of the present disclosure displays near-WT levels of activin A binding, near-WT levels of GDF11 binding, near-WT levels of BMP10 binding, near-WT levels of BMP6 binding, and near-WT levels of BMP9 binding, compared to binding profiles of an unmodified ActRIIB-Fc protein (e.g., WT). In some embodiments, an ActRIIB variant of the present disclosure displays near-WT levels of activin B binding, compared to binding profiles of an unmodified ActRIIB-Fc protein (e.g., WT). In some embodiments, an ActRIIB variant comprises a mutation at any one of positions E52 and/or F82, wherein the variant displays near-WT levels of activin A binding, near-WT levels of GDF11 binding, near-WT levels of BMP10 binding, near-WT levels of BMP6 binding, and near-WT levels of BMP9 binding, compared to binding profiles of an unmodified ActRIIB-Fc protein (e.g., WT). In some embodiments, an ActRIIB variant comprises a mutation at any one of positions E52 and/or F82, wherein the variant exhibits near-WT levels of activin B binding, compared to binding profiles of an unmodified ActRIIB-Fc protein (e.g., WT). In certain aspects, the disclosure relates to a variant ActRIIB polypeptide comprising an amino acid sequence that is at least 75%, 80%, 85%, 90%, 91%, 92%, 93%, 94%, 95%, 96%, 97%, 98%, 99%, or 100% identical to the amino acid sequence of SEQ ID NO: 371. In some embodiments, the variant ActRIIB polypeptide comprises an asparagine at the position corresponding to E52 of SEQ ID NO: 2. In some embodiments, the amino acid sequence of SEQ ID NO: 371 may optionally be provided with the lysine removed from the C-terminus. The G1Fc region may also comprise a mutation to an alanine at position 234 or a mutation to an alanine at position 235, or a combination thereof. In certain aspects, the disclosure relates to a variant ActRIIB polypeptide comprising an amino acid sequence that is at least 75%, 80%, 85%, 90%, 91%, 92%, 93%, 94%, 95%, 96%, 97%, 98%, 99%, or 100% identical to the amino acid sequence of SEQ ID NO: 410. In some embodiments, the variant ActRIIB polypeptide comprises a tyrosine at the position corresponding to F82 of SEQ ID NO: 2. In some embodiments, the amino acid sequence of SEQ ID NO: 410 may optionally be provided with the lysine removed from the C-terminus. The G1Fc region may also comprise a mutation to an alanine at position 234 or a mutation to an alanine at position 235, or a combination thereof.

[0270] In some embodiments, an ActRIIB variant of the present disclosure displays near-WT levels of activin A binding, near-WT levels of GDF11 binding, near-WT levels of BMP10 binding, near-WT levels of BMP6 binding, and a modest reduction in BMP9 binding, compared to binding profiles of an unmodified ActRIIB-Fc protein (e.g., WT). In some embodiments, an ActRIIB variant of the present disclosure displays a minor reduction in activin B binding, compared to binding profiles of an unmodified ActRIIB-Fc protein (e.g., WT). In some embodiments, an ActRIIB variant comprises a mutation at any one of positions E52 and/or F82, wherein the variant displays near-WT levels of activin A binding, near-WT levels of GDF11 binding, near-WT levels of BMP10 binding, near-WT levels of BMP6 binding, and a modest reduction in BMP9 binding, compared to binding profiles of an unmodified ActRIIB-Fc protein (e.g., WT). In some embodiments, an ActRIIB variant comprises a mutation at any one of positions E52 and/or F82, wherein the variant exhibits a minor reduction in activin B binding, compared to binding profiles of an unmodified ActRIIB-Fc protein (e.g., WT). In certain aspects, the disclosure relates to a variant ActRIIB polypeptide comprising an amino acid sequence that is at least 75%, 80%, 85%, 90%, 91%, 92%, 93%, 94%, 95%, 96%, 97%, 98%, 99%, or 100% identical to the amino acid sequence of SEQ ID NO: 416. In some embodiments, the variant ActRIIB polypeptide comprises an aspartic acid at the position corresponding to E52 of SEQ ID NO: 2. In some embodiments, the variant ActRIIB polypeptide comprises an aspartic acid at the position corresponding to F82 of SEQ ID NO: 2. In some embodiments, the variant ActRIIB polypeptide comprises an aspartic acid at the position corresponding to E52 of SEQ ID NO: 2 and an aspartic acid at the position corresponding to F82 of SEQ ID NO: 2. In some embodiments, the amino acid sequence of SEQ ID NO: 416 may optionally be provided with the lysine removed from the C-terminus. The G1Fc region may also comprise a mutation to an alanine at position 234 or a mutation to an alanine at position 235, or a combination thereof.

[0271] In some embodiments, an ActRIIB variant of the present disclosure displays near-WT levels of activin A binding, near-WT levels of GDF11 binding, a minor reduction in BMP10 binding, near-WT levels of BMP6 binding, and a modest reduction in BMP9 binding, compared to binding profiles of an unmodified ActRIIB-Fc protein (e.g., WT). In some embodiments, an ActRIIB variant of the present disclosure displays a minor reduction in activin B binding, compared to binding profiles of an unmodified ActRIIB-Fc protein (e.g., WT). In some embodiments, an ActRIIB variant comprises a mutation at any one of positions L57 and/or F82, wherein the variant displays near-WT levels of activin A binding, near-WT levels of GDF11 binding, a minor reduction in BMP10 binding, near-WT levels of BMP6 binding, and a modest reduction in BMP9 binding, compared to binding profiles of an unmodified ActRIIB-Fc protein (e.g., WT). In some embodiments, an ActRIIB variant comprises a mutation at any one of positions L57 and/or F82, wherein the variant exhibits a minor reduction in activin B binding, compared to binding profiles of an unmodified ActRIIB-Fc protein (e.g., WT). In certain aspects, the disclosure relates to a variant ActRIIB polypeptide comprising an amino acid sequence that is at least 75%, 80%, 85%, 90%, 91%, 92%, 93%, 94%, 95%, 96%, 97%, 98%, 99%, or 100% identical to the amino acid sequence of SEQ ID NO: 428. In some embodiments, the variant ActRIIB polypeptide comprises an arginine at the position corresponding to L57 of SEQ ID NO: 2. In some embodiments, the variant ActRIIB polypeptide comprises a threonine at the position corresponding to F82 of SEQ ID NO: 2. In some embodiments, the variant ActRIIB polypeptide comprises an arginine at the position corresponding to L57 of SEQ ID NO: 2 and a threonine at the position corresponding to F82 of SEQ ID NO: 2. In some embodiments, the amino acid sequence of SEQ ID NO: 428 may optionally be provided with the lysine removed from the C-terminus. The G1Fc region may also comprise a mutation to an alanine at position 234 or a mutation to an alanine at position 235, or a combination thereof.

[0272] In some embodiments, an ActRIIB variant of the present disclosure displays near-WT levels of activin A binding, near-WT levels of GDF11 binding, a minor reduction in BMP10 binding, near-WT levels of BMP6 binding, and a modest reduction in BMP9 binding, compared to binding profiles of an unmodified ActRIIB-Fc protein (e.g., WT). In some embodiments, an ActRIIB variant of the present disclosure displays near-WT levels of activin B binding, compared to binding profiles of an unmodified ActRIIB-Fc protein (e.g., WT). In some embodiments, an ActRIIB variant comprises a mutation at any one of positions L57 and/or F82, wherein the variant displays near-WT levels of activin A binding, near-WT levels of GDF11 binding, a minor reduction in BMP10 binding, near-WT levels of BMP6 binding, and a modest reduction in BMP9 binding, compared to binding profiles of an unmodified ActRIIB-Fc protein (e.g., WT). In some embodiments, an ActRIIB variant comprises a mutation at any one of positions L57 and/or F82, wherein the variant exhibits near-WT levels of activin B binding, compared to binding profiles of an unmodified ActRIIB-Fc protein (e.g., WT). In certain aspects, the disclosure relates to a variant ActRIIB polypeptide comprising an amino acid sequence that is at least 75%, 80%, 85%, 90%, 91%, 92%, 93%, 94%, 95%, 96%, 97%, 98%, 99%, or 100% identical to the amino acid sequence of SEQ ID NO: 425. In some embodiments, the variant ActRIIB polypeptide comprises an arginine at the position corresponding to L57 of SEQ ID NO: 2. In some embodiments, the variant ActRIIB polypeptide comprises a serine at the position corresponding to F82 of SEQ ID NO: 2. In some embodiments, the variant ActRIIB polypeptide comprises an arginine at the position corresponding to L57 of SEQ ID NO: 2 and a serine at the position corresponding to F82 of SEQ ID NO: 2. In some embodiments, the amino acid sequence of SEQ ID NO: 425 may optionally be provided with the lysine removed from the C-terminus. The G1Fc region may also comprise a mutation to an alanine at position 234 or a mutation to an alanine at position 235, or a combination thereof.

[0273] In some embodiments, an ActRIIB variant of the present disclosure displays near-WT levels of activin A binding, near-WT levels of GDF11 binding, near-WT levels of BMP10 binding, a minor reduction in BMP6 binding, and a modest reduction in BMP9 binding, compared to binding profiles of an unmodified ActRIIB-Fc protein (e.g., WT). In some embodiments, an ActRIIB variant of the present disclosure displays a minor reduction in activin B binding, compared to binding profiles of an unmodified ActRIIB-Fc protein (e.g., WT). In some embodiments, an ActRIIB variant comprises a mutation at any one of positions F82 and/or E94, wherein the variant displays near-WT levels of activin A binding, near-WT levels of GDF11 binding, near-WT levels of BMP10 binding, a minor reduction in BMP6 binding, and a modest reduction in BMP9 binding, compared to binding profiles of an unmodified ActRIIB-Fc protein (e.g., WT). In some embodiments, an ActRIIB variant comprises a mutation at any one of positions F82 and/or E94, wherein the variant exhibits a minor reduction in activin B binding, compared to binding profiles of an unmodified ActRIIB-Fc protein (e.g., WT). In certain aspects, the disclosure relates to a variant ActRIIB polypeptide comprising an amino acid sequence that is at least 75%, 80%, 85%, 90%, 91%, 92%, 93%, 94%, 95%, 96%, 97%, 98%, 99%, or 100% identical to the amino acid sequence of SEQ ID NO: 449. In some embodiments, the variant ActRIIB polypeptide comprises an isoleucine at the position corresponding to F82 of SEQ ID NO: 2. In some embodiments, the variant ActRIIB polypeptide comprises a lysine at the position corresponding to E94 of SEQ ID NO: 2. In some embodiments, the variant ActRIIB polypeptide comprises an isoleucine at the position corresponding to F82 of SEQ ID NO: 2 and a lysine at the position corresponding to E94 of SEQ ID NO: 2. In some embodiments, the amino acid sequence of SEQ ID NO: 449 may optionally be provided with the lysine removed from the C-terminus. The G1Fc region may also comprise a mutation to an alanine at position 234 or a mutation to an alanine at position 235, or a combination thereof.

[0274] In certain embodiments, the present disclosure contemplates further mutations of the variant ActRIIB polypeptides so as to alter the glycosylation of the polypeptide. Exemplary glycosylation sites in variant ActRIIB polypeptides are illustrated in FIG. 4. Such mutations may be selected so as to introduce or eliminate one or more glycosylation sites, such as O-linked or N-linked glycosylation sites. Asparagine-linked glycosylation recognition sites generally comprise a tripeptide sequence, asparagine-X-threonine (where “X” is any amino acid) which is specifically recognized by appropriate cellular glycosylation enzymes. The alteration may also be made by the addition of, or substitution by, one or more serine or threonine residues to the sequence of the wild-type ActRIIB polypeptide (for O-linked glycosylation sites). A variety of amino acid substitutions or deletions at one or both of the first or third amino acid positions of a glycosylation recognition site (and/or amino acid deletion at the second position) results in non-glycosylation at the modified tripeptide sequence. Another means of increasing the number of carbohydrate moieties on a variant ActRIIB polypeptide is by chemical or enzymatic coupling of glycosides to the variant ActRIIB polypeptide. Depending on the coupling mode used, the sugar(s) may be attached to (a) arginine and histidine; (b) free carboxyl groups; (c) free sulfhydryl groups such as those of cysteine; (d) free hydroxyl groups such as those of serine, threonine, or hydroxyproline; (e) aromatic residues such as those of phenylalanine, tyrosine, or tryptophan; or (f) the amide group of glutamine. These methods are described in WO 87/05330 published Sep. 11, 1987, and in Aplin and Wriston (1981) CRC Crit. Rev. Biochem., pp. 259-306, incorporated by reference herein. Removal of one or more carbohydrate moieties present on a variant ActRIIB polypeptide may be accomplished chemically and/or enzymatically. Chemical deglycosylation may involve, for example, exposure of the variant ActRIIB polypeptide to the compound trifluoromethanesulfonic acid, or an equivalent compound. This treatment results in the cleavage of most or all sugars except the linking sugar (N-acetylglucosamine or N-acetylgalactosamine), while leaving the amino acid sequence intact. Chemical deglycosylation is further described by Hakimuddin et al. (1987) Arch. Biochem. Biophys. 259:52 and by Edge et al. (1981) Anal. Biochem. 118:131. Enzymatic cleavage of carbohydrate moieties on variant ActRIIB polypeptides can be achieved by the use of a variety of endo- and exo-glycosidases as described by Thotakura et al. (1987) Meth. Enzymol. 138:350. The sequence of a variant ActRIIB polypeptide may be adjusted, as appropriate, depending on the type of expression system used, as mammalian, yeast, insect, and plant cells may all introduce differing glycosylation patterns that can be affected by the amino acid sequence of the peptide. In general, variant ActRIIB proteins for use in humans will be expressed in a mammalian cell line that provides proper glycosylation, such as HEK293 or CHO cell lines, although other mammalian expression cell lines are expected to be useful as well.

[0275] This disclosure further contemplates a method of generating variants, particularly sets of combinatorial variants of an ActRIIB polypeptide, including, optionally, truncation variants; pools of combinatorial mutants are especially useful for identifying functional variant sequences. The purpose of screening such combinatorial libraries may be to generate, for example, variant ActRIIB polypeptides which have altered properties, such as altered pharmacokinetics, or altered ligand binding. A variety of screening assays are provided below, and such assays may be used to evaluate variants. For example, a variant ActRIIB polypeptide may be screened for ability to bind to an ActRIIB polypeptide, to prevent binding of an ActRIIB ligand to an ActRIIB polypeptide.

[0276] The activity of an ActRIIB polypeptide or its variants may also be tested in a cell-based or in vivo assay. For example, the effect of a variant ActRIIB polypeptide on the expression of genes involved in bone production in an osteoblast or precursor may be assessed. This may, as needed, be performed in the presence of one or more recombinant ActRIIB ligand protein (e.g., BMP7), and cells may be transfected so as to produce an ActRIIB polypeptide and/or variants thereof, and optionally, an ActRIIB ligand. Likewise, an ActRIIB polypeptide may be administered to a mouse or other animal, and one or more bone properties, such as density or volume may be assessed. The healing rate for bone fractures may also be evaluated. Similarly, the activity of an ActRIIB polypeptide or its variants may be tested in muscle cells, adipocytes, and neuronal cells for any effect on growth of these cells, for example, by the assays as described below. Such assays are well known and routine in the art. A SMAD-responsive reporter gene may be used in such cell lines to monitor effects on downstream signaling.

[0277] Combinatorially-derived variants can be generated which have a selective potency relative to a naturally occurring ActRIIB polypeptide. Such variant proteins, when expressed from recombinant DNA constructs, can be used in gene therapy protocols. Likewise, mutagenesis can give rise to variants which have intracellular half-lives dramatically different than the corresponding a wild-type ActRIIB polypeptide. For example, the altered protein can be rendered either more stable or less stable to proteolytic degradation or other processes which result in destruction of, or otherwise inactivation of a native ActRIIB polypeptide. Such variants, and the genes which encode them, can be utilized to alter ActRIIB polypeptide levels by modulating the half-life of the ActRIIB polypeptides. For instance, a short half-life can give rise to more transient biological effects and, when part of an inducible expression system, can allow tighter control of recombinant ActRIIB polypeptide levels within the cell.

[0278] In certain embodiments, the variant ActRIIB polypeptides of the disclosure may further comprise post-translational modifications in addition to any that are naturally present in the variant ActRIIB polypeptides. Such modifications include, but are not limited to, acetylation, carboxylation, glycosylation, phosphorylation, lipidation, and acylation. As a result, the modified variant ActRIIB polypeptides may contain non-amino acid elements, such as polyethylene glycols, lipids, poly- or mono-saccharide, and phosphates. Effects of such non-amino acid elements on the functionality of a variant ActRIIB polypeptide may be tested as described herein for other variant ActRIIB polypeptides. When a variant ActRIIB polypeptide is produced in cells by cleaving a nascent form of the variant ActRIIB polypeptide, post-translational processing may also be important for correct folding and/or function of the protein. Different cells (such as CHO, HeLa, MDCK, 293, WI38, NIH-3T3 or HEK293) have specific cellular machinery and characteristic mechanisms for such post-translational activities and may be chosen to ensure the correct modification and processing of the variant ActRIIB polypeptides.

[0279] In certain aspects, variant ActRIIB polypeptides include fusion proteins having at least a portion of the variant ActRIIB polypeptides and one or more fusion domains. Well known examples of such fusion domains include, but are not limited to, polyhistidine, Glu-Glu, glutathione S transferase (GST), thioredoxin, protein A, protein G, an immunoglobulin heavy chain constant region (e.g., an Fc), maltose binding protein (MBP), or human serum albumin. A fusion domain may be selected so as to confer a desired property. For example, some fusion domains are particularly useful for isolation of the fusion proteins by affinity chromatography. For the purpose of affinity purification, relevant matrices for affinity chromatography, such as glutathione-, amylase-, and nickel- or cobalt- conjugated resins are used. Many of such matrices are available in “kit” form, such as the Pharmacia GST purification system and the QIAexpress™ system (Qiagen) useful with (HIS₆) fusion partners. As another example, a fusion domain may be selected so as to facilitate detection of the variant ActRIIB polypeptides. Examples of such detection domains include the various fluorescent proteins (e.g., GFP) as well as “epitope tags,” which are usually short peptide sequences for which a specific antibody is available. Well known epitope tags for which specific monoclonal antibodies are readily available include FLAG, influenza virus haemagglutinin (HA), and c-myc tags. In some cases, the fusion domains have a protease cleavage site, such as for factor Xa or thrombin, which allows the relevant protease to partially digest the fusion proteins and thereby liberate the recombinant proteins therefrom. The liberated proteins can then be isolated from the fusion domain by subsequent chromatographic separation. In certain preferred embodiments, a variant ActRIIB polypeptide is fused with a domain that stabilizes the variant ActRIIB polypeptide in vivo (a “stabilizer” domain). By “stabilizing” is meant anything that increases serum half life, regardless of whether this is because of decreased destruction, decreased clearance by the kidney, or other pharmacokinetic effect. Fusions with the Fc portion of an immunoglobulin are known to confer desirable pharmacokinetic properties on a wide range of proteins. Likewise, fusions to human serum albumin can confer desirable properties. Other types of fusion domains that may be selected include multimerizing (e.g., dimerizing, tetramerizing) domains and functional domains (that confer an additional biological function, such as further stimulation of muscle growth).

[0280] In certain aspects the polypeptides disclosed herein may form homomeric variant ActRIIB polypeptides. In some embodiments, each fusion polypeptide chain in the protein complex comprises the same variant ActRIIB polypeptide as any other such chain in the complex. In certain aspects, the polypeptides disclosed herein may form heteromultimers comprising at least one variant ActRIIB polypeptide associated, covalently or non-covalently, with at least one unmodified ActRIIB polypeptide or at least one variant ActRIIB polypeptide different from the first variant ActRIIB polypeptide. For example, in some embodiments the disclosure provides for an ActRIIB heteromultimer (e.g., dimer), wherein the heteromultimer comprises: a) a first variant ActRIIB polypeptide comprising one or more of any of the amino acid substitutions disclosed herein multimerizes (e.g., dimerizes), and b) a second variant ActRIIB polypeptide having a different amino acid substitution or a different combination of amino acid substitutions as the first ActRIIB polypeptide.

[0281] In certain aspects, the polypeptides disclosed herein may form heteromultimers comprising at least one variant ActRIIB polypeptide associated, covalently or non-covalently, with at least one ALK4 polypeptide, including fragments and variants thereof. In some embodiments, the polypeptides disclosed herein may form heteromultimers comprising at least one variant ActRIIB polypeptide associated, covalently or non-covalently, with at least one ALK7 polypeptide, including fragments and variants thereof. In some embodiments, heteromeric polypeptides disclosed herein form heterodimers, although higher order heteromultimers are also included such as, but not limited to, heterotrimers, heterotetramers, and further oligomeric structures.

[0282] In some embodiments, variant ActRIIB polypeptides of the present disclosure comprise at least one multimerization domain. As disclosed herein, the term “multimerization domain” refers to an amino acid or sequence of amino acids that promote covalent or non-covalent interaction between at least a first polypeptide and at least a second polypeptide. Variant ActRIIB polypeptides disclosed herein may be joined covalently or non-covalently to a multimerization domain. Preferably, a multimerization domain promotes interaction between a first polypeptide (e.g., variant ActRIIB polypeptide) and a second polypeptide (e.g., an ALK4 polypeptide or an ALK7 polypeptide) to promote heteromultimer formation (e.g., heterodimer formation), and optionally hinders or otherwise disfavors homomultimer formation (e.g., homodimer formation), thereby increasing the yield of desired heteromultimer (see, e.g., FIG. 1B). In some embodiments, variant ActRIIB polypeptide of the disclosure form homodimers. In some embodiments, variant ActRIIB polypeptides may from heterodimers through covalent interactions. In some embodiments, variant ActRIIB polypeptides may from heterodimers through non-covalent interactions. In some embodiments, variant ActRIIB polypeptides may from heterodimers through both covalent and non-covalent interactions.

[0283] In certain aspects, a variant ActRIIB polypeptide, including homomultimers thereof (e.g., homodimers), binds to one or more TGF-beta superfamily ligands. In some embodiments, variant ActRIIB polypeptide, including homomultimers thereof, binds to one or more TGF-beta superfamily ligands with a K_{D} of at least 1 × 10⁻⁷ M. In some embodiments, the one or more TGF-beta superfamily ligands is selected from the group consisting of: activin A, activin B, GDF8, GDF11, and BMP10.

[0284] In certain aspects, a variant ActRIIB polypeptide, including homomultimers thereof (e.g., homodimers), inhibits one or more TGF-beta super family ligands. In some embodiments, variant ActRIIB polypeptide, including homomultimers thereof, inhibits signaling of one or more TGF-beta super family ligands. In some embodiments, variant ActRIIB polypeptide, including homomultimers thereof, inhibits Smad signaling of one or more TGF-beta super family ligands. In some embodiments, variant ActRIIB polypeptide, including homomultimers thereof, inhibits signaling of one or more TGF-beta super family ligands in a cell-based assay. In some embodiments, variant ActRIIB polypeptide, including homomultimers thereof, inhibits one or more TGF-beta super family ligands selected from the group consisting of: activin A, activin B, GDF8, GDF11, and BMP10.

[0285] In certain embodiments, the disclosure relates to a heteromultimer comprising a first variant ActRIIB-Fc fusion protein and a second variant ActRIIB-Fc fusion protein, wherein the first variant ActRIIB polypeptide does not comprise the amino acid sequence of the second variant ActRIIB polypeptide. In some embodiments, an ActRIIB-Fc:ActRIIB-Fc heteromultimer binds to one or more TGF-beta superfamily ligands such as those described herein. In some embodiments, an ActRIIB-Fc:ActRIIB-Fc heteromultimer inhibits signaling of one or more TGF-beta superfamily ligands such as those described herein. In some embodiments, an ActRIIB-Fc:ActRIIB-Fc heteromultimer is a heterodimer.

[0286] In some embodiments, the first ActRIIB polypeptide comprises one or more amino acid substitutions at the amino acid positions corresponding to any one of N35, E50, E52, K55, L57, Y60, G68, K74, W78, L79, F82, N83, and E94 of SEQ ID NO: 2. In some embodiments, the first ActRIIB polypeptide comprises one or more amino acid substitutions at the amino acid positions corresponding to any one of L79, A24, K74, R64, P129, P130, E37, R40, D54, R56, W78, D80, and F82 of SEQ ID NO: 2. In some embodiments, the first ActRIIB polypeptide comprises one or more amino acid substitutions at the amino acid positions corresponding to any one of L38N, E50L, E52N, L57E, L57I, L57R, L57T, L57V, Y60D, G68R, K74E, W78Y, L79F, L79S, L79T, L79W, F82D, F82E, F82L, F82S, F82T, F82Y, N83R, E94K, and V99G of SEQ ID NO: 2. In some embodiments, the one or more amino acid substitutions is selected from the group consisting of: A24N, K74A, R64K, R64N, K74A, L79A, L79D, L79E, L79P, P129S, P130A, P130R, E37A, R40A, D54A, R56A, K74F, K74I, K74Y, W78A, D80A, D80F, D80G, D80I, D80K, D80M, D80M, D80N, D80R, and F82A. In some embodiments, the one or more amino acid substitutions is selected from the group consisting of: L38N, E50L, E52N, L57E, L57I, L57R, L57T, L57V, Y60D, G68R, K74E, W78Y, L79F, L79S, L79T, L79W, F82D, F82E, F82L, F82S, F82T, F82Y, N83R, E94K, and V99G. In some embodiments, the first ActRIIB polypeptide comprises one or more amino acid substitutions at the amino acid positions correspond to any one of A24, S26, N35, E37, L38, R40, S44, L46, E50, E52, Q53, D54, K55, R56, L57, Y60, R64, N65, S67, G68, K74, W78, L79, D80, F82, N83, T93, E94, Q98, V99, E105, E106, F108, E111, R112, A119, G120, E123, P129, P130, and A132. In some embodiments, the one or more amino acid substitutions of selected from the group consisting of: A24N, S26T, N35E, E37A, E37D, L38N, R40A, R40K, S44T, L46V, L46I, L46F, L46A, E50K, E50P, E50L, E52A, E52D, E52G, E52H, E52K, E52N, E52P, E52R, E52S, E52T, E52Y, Q53R, Q53K, Q53N, Q53H, D54A, K55A, K55D, K55E, K55R, R56A, L57E, L57I, L57R, L57T, L57V, Y60D, Y60F, Y60K, Y60P, R64A, R64H, R64K, R64N, N65A, S67N, S67T, G68R, K74A, K74E, K74F, K74I, K74R, K74Y, W78A, W78Y, L79A, L79D, L79E, L79F, L79H, L79K, L79P, L79R, L79S, L79T, L79W, D80A, D80F, D80G, D80I, D80K, D80M, D80N, D80R, F82A, F82D, F82E, F82I, F82K, F82L, F82S, F82T, F82W, F82Y, N83A, N83R, T93D, T93E, T93G, T93H, T93K, T93P, T93R, T93S, T93Y, E94K, Q98D, Q98E, Q98K, Q98R, V99E, V99G, V99K, E105N, F108I, F108L, F108V, F108Y, E111D, E111H, E111K, 111N, E111Q, E111R, R112H, R112K, R112N, R112S, R112T, A119P, A119V, G120N, E123N, P129N, P129S, P130A, P130R, and A132N. In some embodiments, the second ActRIIB polypeptide comprises one or more amino acid substitutions at the amino acid positions corresponding to any one of L79, A24, K74, R64, P129, P130, E37, R40, D54, R56, W78, D80, and F82 of SEQ ID NO: 2. In some embodiments, the one or more amino acid substitutions is selected from the group consisting of: A24N, K74A, R64K, R64N, K74A, L79A, L79D, L79E, L79P, P129S, P130A, P130R, E37A, R40A, D54A, R56A, K74F, K74I, K74Y, W78A, D80A, D80F, D80G, D80I, D80K, D80M, D80M, D80N, D80R, and F82A. In some embodiments, the second ActRIIB polypeptide comprises one or more amino acid substitutions at the amino acid positions corresponding to any one of L38N, E50L, E52N, L57E, L57I, L57R, L57T, L57V, Y60D, G68R, K74E, W78Y, L79F, L79S, L79T, L79W, F82D, F82E, F82L, F82S, F82T, F82Y, N83R, E94K, and V99G of SEQ ID NO: 2. In some embodiments, the one or more amino acid substitutions is selected from the group consisting of: L38N, E50L, E52N, L57E, L57I, L57R, L57T, L57V, Y60D, G68R, K74E, W78Y, L79F, L79S, L79T, L79W, F82D, F82E, F82L, F82S, F82T, F82Y, N83R, E94K, and V99G. In some embodiments, the second ActRIIB polypeptide comprises one or more amino acid substitutions at the amino acid positions correspond to any one of A24, S26, N35, E37, L38, R40, S44, L46, E50, E52, Q53, D54, K55, R56, L57, Y60, R64, N65, S67, G68, K74, W78, L79, D80, F82, N83, T93, E94, Q98, V99, E105, E106, F108, E111, R112, A119, G120, E123, P129, P130, and A132. In some embodiments, the one or more amino acid substitutions of selected from the group consisting of: A24N, S26T, N35E, E37A, E37D, L38N, R40A, R40K, S44T, L46V, L46I, L46F, L46A, E50K, E50P, E50L, E52A, E52D, E52G, E52H, E52K, E52N, E52P, E52R, E52S, E52T, E52Y, Q53R, Q53K, Q53N, Q53H, D54A, K55A, K55D, K55E, K55R, R56A, L57E, L57I, L57R, L57T, L57V, Y60D, Y60F, Y60K, Y60P, R64A, R64H, R64K, R64N, N65A, S67N, S67T, G68R, K74A, K74E, K74F, K74I, K74R, K74Y, W78A, W78Y, L79A, L79D, L79E, L79F, L79H, L79K, L79P, L79R, L79S, L79T, L79W, D80A, D80F, D80G, D80I, D80K, D80M, D80N, D80R, F82A, F82D, F82E, F82I, F82K, F82L, F82S, F82T, F82W, F82Y, N83A, N83R, T93D, T93E, T93G, T93H, T93K, T93P, T93R, T93S, T93Y, E94K, Q98D, Q98E, Q98K, Q98R, V99E, V99G, V99K, E105N, F108I, F108L, F108V, F108Y, E111D, E111H, E111K, 111N, E111Q, E111R, R112H, R112K, R112N, R112S, R112T, A119P, A119V, G120N, E123N, P129N, P129S, P130A, P130R, and A132N. In some embodiments, the first ActRIIB polypeptide and/or the second ActRIIB polypeptide comprise one or more amino acid modification that promote heteromultimer formation. In some embodiments, the first ActRIIB polypeptide and/or the second ActRIIB polypeptide comprise one or more amino acid modification that inhibit heteromultimer formation. In some embodiments, the heteromultimer is a heterodimer.

[0287] In certain aspects, the disclosure relates to a heteromultimer comprising a first ActRIIB polypeptide that is at least 75%, 80%, 85%, 90%, 91%, 92%, 93%, 94%, 95%, 96%, 97%, 98%, 99%, or 100% identical to the amino acid sequence of SEQ ID NO: 36, and second ActRIIB polypeptide that is at least 75%, 80%, 85%, 90%, 91%, 92%, 93%, 94%, 95%, 96%, 97%, 98%, 99%, or 100% identical to the amino acid sequence of SEQ ID NO: 5, wherein the first ActRIIB polypeptide does not comprise the amino acid sequence of the second ActRIIB polypeptide. In some embodiments, the first ActRIIB polypeptide comprises a glutamic acid at the amino acid position corresponding to 55 of SEQ ID NO: 2. In some embodiments, the second ActRIIB polypeptide does not comprise a glutamic acid at the amino acid position corresponding to 55 of SEQ ID NO: 2. In some embodiments, the second ActRIIB polypeptide comprises a lysine at the amino acid position corresponding to 55 of SEQ ID NO: 2. In some embodiments, the first ActRIIB polypeptide comprises one or more amino acid substitutions at the amino acid positions corresponding to any one of F82, L79, A24, K74, R64, P129, P130, E37, R40, D54, R56, W78, and D80 of SEQ ID NO: 2. In some embodiments, the one or more amino acid substitutions is selected from the group consisting of: A24N, K74A, R64K, R64N, K74A, L79A, L79D, L79E, L79P, P129S, P130A, P130R, E37A, R40A, D54A, R56A, K74F, K74I, K74Y, W78A, D80A, D80F, D80G, D80I, D80K, D80M, D80M, D80N, D80R, and F82A. In some embodiments, the second ActRIIB polypeptide comprises one or more amino acid substitutions at the amino acid positions corresponding to any one of L79, A24, K74, R64, P129, P130, E37, R40, D54, R56, W78, D80, and F82 of SEQ ID NO: 2. In some embodiments, the one or more amino acid substitutions is selected from the group consisting of: A24N, K74A, R64K, R64N, K74A, L79A, L79D, L79E, L79P, P129S, P130A, P130R, E37A, R40A, D54A, R56A, K74F, K74I, K74Y, W78A, D80A, D80F, D80G, D80I, D80K, D80M, D80M, D80N, D80R, and F82A. In some embodiments, the first ActRIIB polypeptide comprises one or more amino acid substitutions at the amino acid positions corresponding to any one of A24, S26, N35, E37, L38, R40, S44, L46, E50, E52, Q53, D54, K55, R56, L57, Y60, R64, N65, S67, G68, K74, W78, L79, D80, F82, N83, T93, E94, Q98, V99, E105, E106, F108, E111, R112, A119, G120, E123, P129, P130, and A132 of SEQ ID NO: 2. In some embodiments, the one or more amino acid substitutions is selected from the group consisting of: A24N, S26T, N35E, E37A, E37D, L38N, R40A, R40K, S44T, L46V, L46I, L46F, L46A, E50K, E50P, E50L, E52A, E52D, E52G, E52H, E52K, E52N, E52P, E52R, E52S, E52T, E52Y, Q53R, Q53K, Q53N, Q53H, D54A, K55A, K55D, K55E, K55R, R56A, L57E, L57I, L57R, L57T, L57V, Y60D, Y60F, Y60K, Y60P, R64A, R64H, R64K, R64N, N65A, S67N, S67T, G68R, K74A, K74E, K74F, K74I, K74R, K74Y, W78A, W78Y, L79A, L79D, L79E, L79F, L79H, L79K, L79P, L79R, L79S, L79T, L79W, D80A, D80F, D80G, D80I, D80K, D80M, D80N, D80R, F82A, F82D, F82E, F82I, F82K, F82L, F82S, F82T, F82W, F82Y, N83A, N83R, T93D, T93E, T93G, T93H, T93K, T93P, T93R, T93S, T93Y, E94K, Q98D, Q98E, Q98K, Q98R, V99E, V99G, V99K, E105N, F108I, F108L, F108V, F108Y, E111D, E111H, E111K, 111N, E111Q, E111R, R112H, R112K, R112N, R112S, R112T, A119P, A119V, G120N, E123N, P129N, P129S, P130A, P130R, and A132N. In some embodiments, the second ActRIIB polypeptide comprises one or more amino acid substitutions at the amino acid positions corresponding to any one of L79, A24, K74, R64, P129, P130, E37, R40, D54, R56, W78, D80, and F82 of SEQ ID NO: 2. In some embodiments, the one or more amino acid substitutions is selected from the group consisting of: A24N, S26T, N35E, E37A, E37D, L38N, R40A, R40K, S44T, L46V, L46I, L46F, L46A, E50K, E50P, E50L, E52A, E52D, E52G, E52H, E52K, E52N, E52P, E52R, E52S, E52T, E52Y, Q53R, Q53K, Q53N, Q53H, D54A, K55A, K55D, K55E, K55R, R56A, L57E, L57I, L57R, L57T, L57V, Y60D, Y60F, Y60K, Y60P, R64A, R64H, R64K, R64N, N65A, S67N, S67T, G68R, K74A, K74E, K74F, K74I, K74R, K74Y, W78A, W78Y, L79A, L79D, L79E, L79F, L79H, L79K, L79P, L79R, L79S, L79T, L79W, D80A, D80F, D80G, D80I, D80K, D80M, D80N, D80R, F82A, F82D, F82E, F82I, F82K, F82L, F82S, F82T, F82W, F82Y, N83A, N83R, T93D, T93E, T93G, T93H, T93K, T93P, T93R, T93S, T93Y, E94K, Q98D, Q98E, Q98K, Q98R, V99E, V99G, V99K, E105N, F108I, F108L, F108V, F108Y, E111D, E111H, E111K, 111N, E111Q, E111R, R112H, R112K, R112N, R112S, R112T, A119P, A119V, G120N, E123N, P129N, P129S, P130A, P130R, and A132N. In some embodiments, the first ActRIIB polypeptide and/or the second ActRIIB polypeptide comprise one or more amino acid modification that promote heteromultimer formation. In some embodiments, the first ActRIIB polypeptide and/or the second ActRIIB polypeptide comprise one or more amino acid modification that inhibit heteromultimer formation. In some embodiments, the heteromultimer is a heterodimer.

[0288] In certain aspects, the disclosure relates to a heteromultimer comprising a first ActRIIB polypeptide that is at least 75%, 80%, 85%, 90%, 91%, 92%, 93%, 94%, 95%, 96%, 97%, 98%, 99%, or 100% identical to the amino acid sequence of SEQ ID NO: 39, and second ActRIIB polypeptide that is at least 75%, 80%, 85%, 90%, 91%, 92%, 93%, 94%, 95%, 96%, 97%, 98%, 99%, or 100% identical to the amino acid sequence of SEQ ID NO: 5, wherein the first ActRIIB polypeptide does not comprise the amino acid sequence of the second ActRIIB polypeptide. In some embodiments, the first ActRIIB polypeptide comprises an isoleucine at the amino acid position corresponding to 82 of SEQ ID NO: 2. In some embodiments, the second ActRIIB polypeptide does not comprise an isoleucine acid at the amino acid position corresponding to 82 of SEQ ID NO: 2. In some embodiments, the second ActRIIB polypeptide comprises a phenylalanine at the amino acid position corresponding to 82 of SEQ ID NO: 2. In some embodiments, the first ActRIIB polypeptide comprises one or more amino acid substitutions at the amino acid positions corresponding to any one of L79, A24, K74, R64, P129, P130, E37, R40, D54, R56, W78, and D80 of SEQ ID NO: 2. In some embodiments, the one or more amino acid substitutions is selected from the group consisting of: A24N, K74A, R64K, R64N, K74A, L79A, L79D, L79E, L79P, P129S, P130A, P130R, E37A, R40A, D54A, R56A, K74F, K74I, K74Y, W78A, D80A, D80F, D80G, D80I, D80K, D80M, D80M, D80N, and D80R. In some embodiments, the second ActRIIB polypeptide comprises one or more amino acid substitutions at the amino acid positions corresponding to any one of L79, A24, K74, R64, P129, P130, E37, R40, D54, R56, W78, and D80 of SEQ ID NO: 2. In some embodiments, the one or more amino acid substitutions is selected from the group consisting of: A24N, K74A, R64K, R64N, K74A, L79A, L79D, L79E, L79P, P129S, P130A, P130R, E37A, R40A, D54A, R56A, K74F, K74I, K74Y, W78A, D80A, D80F, D80G, D80I, D80K, D80M, D80M, D80N, and D80R. In some embodiments, the first ActRIIB polypeptide comprises one or more amino acid substitutions at the amino acid positions corresponding to any one of A24, S26, N35, E37, L38, R40, S44, L46, E50, E52, Q53, D54, K55, R56, L57, Y60, R64, N65, S67, G68, K74, W78, L79, D80, F82, N83, T93, E94, Q98, V99, E105, E106, F108, E111, R112, A119, G120, E123, P129, P130, and A132 of SEQ ID NO: 2. In some embodiments, the one or more amino acid substitutions is selected from the group consisting of: A24N, S26T, N35E, E37A, E37D, L38N, R40A, R40K, S44T, L46V, L46I, L46F, L46A, E50K, E50P, E50L, E52A, E52D, E52G, E52H, E52K, E52N, E52P, E52R, E52S, E52T, E52Y, Q53R, Q53K, Q53N, Q53H, D54A, K55A, K55D, K55E, K55R, R56A, L57E, L57I, L57R, L57T, L57V, Y60D, Y60F, Y60K, Y60P, R64A, R64H, R64K, R64N, N65A, S67N, S67T, G68R, K74A, K74E, K74F, K74I, K74R, K74Y, W78A, W78Y, L79A, L79D, L79E, L79F, L79H, L79K, L79P, L79R, L79S, L79T, L79W, D80A, D80F, D80G, D80I, D80K, D80M, D80N, D80R, F82A, F82D, F82E, F82I, F82K, F82L, F82S, F82T, F82W, F82Y, N83A, N83R, T93D, T93E, T93G, T93H, T93K, T93P, T93R, T93S, T93Y, E94K, Q98D, Q98E, Q98K, Q98R, V99E, V99G, V99K, E105N, F108I, F108L, F108V, F108Y, E111D, E111H, E111K, 111N, E111Q, E111R, R112H, R112K, R112N, R112S, R112T, A119P, A119V, G120N, E123N, 129N, P129S, P130A, P130R, and A132N.. In some embodiments, the second ActRIIB polypeptide comprises one or more amino acid substitutions at the amino acid positions corresponding to any one of L79, A24, K74, R64, 129, P130, E37, R40, D54, R56, W78, D80, and F82 of SEQ ID NO: 2. In some embodiments, the one or more amino acid substitutions is selected from the group consisting of: A24N, S26T, N35E, E37A, E37D, L38N, R40A, R40K, S44T, L46V, L46I, L46F, L46A, E50K, E50P, E50L, E52A, E52D, E52G, E52H, E52K, E52N, E52P, E52R, E52S, E52T, E52Y, Q53R, Q53K, Q53N, Q53H, D54A, K55A, K55D, K55E, K55R, R56A, L57E, L57I, L57R, L57T, L57V, Y60D, Y60F, Y60K, Y60P, R64A, R64H, R64K, R64N, N65A, S67N, S67T, G68R, K74A, K74E, K74F, K74I, K74R, K74Y, W78A, W78Y, L79A, L79D, L79E, L79F, L79H, L79K, L79P, L79R, L79S, L79T, L79W, D80A, D80F, D80G, D80I, D80K, D80M, D80N, D80R, F82A, F82D, F82E, F82I, F82K, F82L, F82S, F82T, F82W, F82Y, N83A, N83R, T93D, T93E, T93G, T93H, T93K, T93P, T93R, T93S, T93Y, E94K, Q98D, Q98E, Q98K, Q98R, V99E, V99G, V99K, E105N, F108I, F108L, F108V, F108Y, E111D, E111H, E111K, 111N, E111Q, E111R, R112H, R112K, R112N, R112S, R112T, A119P, A119V, G120N, E123N, P129N, P129S, 130A, P130R, and A132N. In some embodiments, the first ActRIIB polypeptide and/or the second ActRIIB polypeptide comprise one or more amino acid modifications that promote heteromultimer formation. In some embodiments, the first ActRIIB polypeptide and/or the second ActRIIB polypeptide comprise one or more amino acid modification that inhibit heteromultimer formation. In some embodiments, the heteromultimer is a heterodimer.

[0289] In certain aspects, the disclosure relates to a heteromultimer comprising a first ActRIIB polypeptide that is at least 75%, 80%, 85%, 90%, 91%, 92%, 93%, 94%, 95%, 96%, 97%, 98%, 99%, or 100% identical to the amino acid sequence of SEQ ID NO: 42, and second ActRIIB polypeptide that is at least 75%, 80%, 85%, 90%, 91%, 92%, 93%, 94%, 95%, 96%, 97%, 98%, 99%, or 100% identical to the amino acid sequence of SEQ ID NO: 5, wherein the first ActRIIB polypeptide does not comprise the amino acid sequence of the second ActRIIB polypeptide. In some embodiments, first ActRIIB polypeptide comprises a lysine at the amino acid position corresponding to 82 of SEQ ID NO: 2. In some embodiments, the second ActRIIB polypeptide does not comprise a lysine at the amino acid position corresponding to 82 of SEQ ID NO: 2. In some embodiments, the second ActRIIB polypeptide comprises a phenylalanine at the amino acid position corresponding to 82 of SEQ ID NO: 2. In some embodiments, the first ActRIIB polypeptide comprises one or more amino acid substitutions at the amino acid positions corresponding to any one of L79, A24, K74, R64, P129, P130, E37, R40, D54, R56, W78, and D80 of SEQ ID NO: 2. In some embodiments, the one or more amino acid substitutions is selected from the group consisting of: A24N, K74A, R64K, R64N, K74A, L79A, L79D, L79E, L79P, P129S, P130A, P130R, E37A, R40A, D54A, R56A, K74F, K74I, K74Y, W78A, D80A, D80F, D80G, D80I, D80K, D80M, D80M, D80N, and D80R. In some embodiments, the second ActRIIB polypeptide comprises one or more amino acid substitutions at the amino acid positions corresponding to any one of L79, A24, K74, R64, P129, P130, E37, R40, D54, R56, W78, and D80 of SEQ ID NO: 2. In some embodiments, the one or more amino acid substitutions is selected from the group consisting of: A24N, K74A, R64K, R64N, K74A, L79A, L79D, L79E, L79P, P129S, P130A, 130R, E37A, R40A, D54A, R56A, K74F, K74I, K74Y, W78A, D80A, D80F, D80G, D80I, D80K, D80M, D80M, D80N, and D80R. In some embodiments, the first ActRIIB polypeptide comprises one or more amino acid substitutions at the amino acid positions corresponding to any one of A24, S26, N35, E37, L38, R40, S44, L46, E50, E52, Q53, D54, K55, R56, L57, Y60, R64, N65, S67, G68, K74, W78, L79, D80, F82, N83, T93, E94, Q98, V99, E105, E106, F108, E111, R112, A119, G120, E123, P129, P130, and A132 of SEQ ID NO: 2. In some embodiments, the one or more amino acid substitutions is selected from the group consisting of: A24N, S26T, N35E, E37A, E37D, L38N, R40A, R40K, S44T, L46V, L46I, L46F, L46A, E50K, E50P, E50L, E52A, E52D, E52G, E52H, E52K, E52N, E52P, E52R, E52S, E52T, E52Y, Q53R, Q53K, Q53N, Q53H, D54A, K55A, K55D, K55E, K55R, R56A, L57E, L57I, L57R, L57T, L57V, Y60D, Y60F, Y60K, Y60P, R64A, R64H, R64K, R64N, N65A, S67N, S67T, G68R, K74A, K74E, K74F, K74I, K74R, K74Y, W78A, W78Y, L79A, L79D, L79E, L79F, L79H, L79K, L79P, L79R, L79S, L79T, L79W, D80A, D80F, D80G, D80I, D80K, D80M, D80N, D80R, F82A, F82D, F82E, F82I, F82K, F82L, F82S, F82T, F82W, F82Y, N83A, N83R, T93D, T93E, T93G, T93H, T93K, T93P, T93R, T93S, T93Y, E94K, Q98D, Q98E, Q98K, Q98R, V99E, V99G, V99K, E105N, F108I, F108L, F108V, F108Y, E111D, E111H, E111K, 111N, E111Q, E111R, R112H, R112K, R112N, R112S, R112T, A119P, A119V, G120N, E123N, P129N, P129S, P130A, P130R, and A132N.. In some embodiments, the second ActRIIB polypeptide comprises one or more amino acid substitutions at the amino acid positions corresponding to any one of L79, A24, K74, R64, P129, P130, E37, R40, D54, R56, W78, D80, and F82 of SEQ ID NO: 2. In some embodiments, the one or more amino acid substitutions is selected from the group consisting of: A24N, S26T, N35E, E37A, E37D, L38N, R40A, R40K, S44T, L46V, L46I, L46F, L46A, E50K, E50P, E50L, E52A, E52D, E52G, E52H, E52K, E52N, E52P, E52R, E52S, E52T, E52Y, Q53R, Q53K, Q53N, Q53H, D54A, K55A, K55D, K55E, K55R, R56A, L57E, L57I, L57R, L57T, L57V, Y60D, Y60F, Y60K, Y60P, R64A, R64H, R64K, R64N, N65A, S67N, S67T, G68R, K74A, K74E, K74F, K74I, K74R, K74Y, W78A, W78Y, L79A, L79D, L79E, L79F, L79H, L79K, L79P, L79R, L79S, L79T, L79W, D80A, D80F, D80G, D80I, D80K, D80M, D80N, D80R, F82A, F82D, F82E, F82I, F82K, F82L, F82S, F82T, F82W, F82Y, N83A, N83R, T93D, T93E, T93G, T93H, T93K, T93P, T93R, T93S, T93Y, E94K, Q98D, Q98E, Q98K, Q98R, V99E, V99G, V99K, E105N, F108I, F108L, F108V, F108Y, E111D, E111H, E111K, 111N, E111Q, E111R, R112H, R112K, R112N, R112S, R112T, A119P, A119V, G120N, E123N, P129N, P129S, P130A, P130R, and A132N. In some embodiments, the first ActRIIB polypeptide and/or the second ActRIIB polypeptide comprise one or more amino acid modifications that promote heteromultimer formation. In some embodiments, the first ActRIIB polypeptide and/or the second ActRIIB polypeptide comprise one or more amino acid modifications that inhibit heteromultimer formation. In some embodiments, the heteromultimer is a heterodimer.

[0290] In certain aspects, the disclosure relates to a heteromultimer comprising a first ActRIIB polypeptide that is at least 75%, 80%, 85%, 90%, 91%, 92%, 93%, 94%, 95%, 96%, 97%, 98%, 99%, or 100% identical to the amino acid sequence of SEQ ID NO: 524, and second ActRIIB polypeptide that is at least 75%, 80%, 85%, 90%, 91%, 92%, 93%, 94%, 95%, 96%, 97%, 98%, 99%, or 100% identical to the amino acid sequence of SEQ ID NO: 5, wherein the first ActRIIB polypeptide does not comprise the amino acid sequence of the second ActRIIB polypeptide. In some embodiments, first ActRIIB polypeptide comprises a lysine at the amino acid position corresponding to 82 of SEQ ID NO: 2. In some embodiments, the second ActRIIB polypeptide does not comprise a lysine at the amino acid position corresponding to 82 of SEQ ID NO: 2. In some embodiments, the second ActRIIB polypeptide comprises a phenylalanine at the amino acid position corresponding to 82 of SEQ ID NO: 2. In some embodiments, the first ActRIIB polypeptide comprises one or more amino acid substitutions at the amino acid positions corresponding to any one of L79, A24, K74, R64, P129, P130, E37, R40, D54, R56, W78, and D80 of SEQ ID NO: 2. In some embodiments, the one or more amino acid substitutions is selected from the group consisting of: A24N, K74A, R64K, R64N, K74A, L79A, L79D, L79E, L79P, P129S, P130A, P130R, E37A, R40A, D54A, R56A, K74F, K74I, K74Y, W78A, D80A, D80F, D80G, D80I, D80K, D80M, D80M, D80N, and D80R. In some embodiments, the second ActRIIB polypeptide comprises one or more amino acid substitutions at the amino acid positions corresponding to any one of L79, A24, K74, R64, P129, P130, E37, R40, D54, R56, W78, and D80 of SEQ ID NO: 2. In some embodiments, the one or more amino acid substitutions is selected from the group consisting of: A24N, K74A, R64K, R64N, K74A, L79A, L79D, L79E, L79P, P129S, P130A, P130R, E37A, R40A, D54A, R56A, K74F, K74I, K74Y, W78A, D80A, D80F, D80G, D80I, D80K, D80M, D80M, D80N, and D80R. In some embodiments, the first ActRIIB polypeptide comprises one or more amino acid substitutions at the amino acid positions corresponding to any one of A24, S26, N35, E37, L38, R40, S44, L46, E50, E52, Q53, D54, K55, R56, L57, Y60, R64, N65, S67, G68, K74, W78, L79, D80, F82, N83, T93, E94, Q98, V99, E105, E106, F108, E111, R112, A119, G120, E123, P129, P130, and A132 of SEQ ID NO: 2. In some embodiments, the one or more amino acid substitutions is selected from the group consisting of: A24N, S26T, N35E, E37A, E37D, L38N, R40A, R40K, S44T, L46V, L46I, L46F, L46A, E50K, E50P, E50L, E52A, E52D, E52G, E52H, E52K, E52N, E52P, E52R, E52S, E52T, E52Y, Q53R, Q53K, Q53N, Q53H, D54A, K55A, K55D, K55E, K55R, R56A, L57E, L57I, L57R, L57T, L57V, Y60D, Y60F, Y60K, Y60P, R64A, R64H, R64K, R64N, N65A, S67N, S67T, G68R, K74A, K74E, K74F, K74I, K74R, K74Y, W78A, W78Y, L79A, L79D, L79E, L79F, L79H, L79K, L79P, L79R, L79S, L79T, L79W, D80A, D80F, D80G, D80I, D80K, D80M, D80N, D80R, F82A, F82D, F82E, F82I, F82K, F82L, F82S, F82T, F82W, F82Y, N83A, N83R, T93D, T93E, T93G, T93H, T93K, T93P, T93R, T93S, T93Y, E94K, Q98D, Q98E, Q98K, Q98R, V99E, V99G, V99K, E105N, F108I, F108L, F108V, F108Y, E111D, E111H, E111K, 111N, E111Q, E111R, R112H, R112K, R112N, R112S, R112T, A119P, A119V, G120N, E123N, P129N, P129S, P130A, P130R, and A132N.. In some embodiments, the second ActRIIB polypeptide comprises one or more amino acid substitutions at the amino acid positions corresponding to any one of L79, A24, K74, R64, P129, P130, E37, R40, D54, R56, W78, D80, and F82 of SEQ ID NO: 2. In some embodiments, the one or more amino acid substitutions is selected from the group consisting of: A24N, S26T, N35E, E37A, E37D, L38N, R40A, R40K, S44T, L46V, L46I, L46F, L46A, E50K, E50P, E50L, E52A, E52D, E52G, E52H, E52K, E52N, E52P, E52R, E52S, E52T, E52Y, Q53R, Q53K, Q53N, Q53H, D54A, K55A, K55D, K55E, K55R, R56A, L57E, L57I, L57R, L57T, L57V, Y60D, Y60F, Y60K, Y60P, R64A, R64H, R64K, R64N, N65A, S67N, S67T, G68R, K74A, K74E, K74F, K74I, K74R, K74Y, W78A, W78Y, L79A, L79D, L79E, L79F, L79H, L79K, L79P, L79R, L79S, L79T, L79W, D80A, D80F, D80G, D80I, D80K, D80M, D80N, D80R, F82A, F82D, F82E, F82I, F82K, F82L, F82S, F82T, F82W, F82Y, N83A, N83R, T93D, T93E, T93G, T93H, T93K, T93P, T93R, T93S, T93Y, E94K, Q98D, Q98E, Q98K, Q98R, V99E, V99G, V99K, E105N, F108I, F108L, F108V, F108Y, E111D, E111H, E111K, 111N, E111Q, E111R, R112H, R112K, R112N, R112S, R112T, A119P, A119V, G120N, E123N, P129N, P129S, P130A, P130R, and A132N. In some embodiments, the first ActRIIB polypeptide and/or the second ActRIIB polypeptide comprise one or more amino acid modifications that promote heteromultimer formation. In some embodiments, the first ActRIIB polypeptide and/or the second ActRIIB polypeptide comprise one or more amino acid modifications that inhibit heteromultimer formation. In some embodiments, the heteromultimer is a heterodimer.

[0291] In certain aspects, the disclosure relates to a heteromultimer comprising a first ActRIIB polypeptide that is at least 75%, 80%, 85%, 90%, 91%, 92%, 93%, 94%, 95%, 96%, 97%, 98%, 99%, or 100% identical to the amino acid sequence of SEQ ID NO: 45, and second ActRIIB polypeptide that is at least 75%, 80%, 85%, 90%, 91%, 92%, 93%, 94%, 95%, 96%, 97%, 98%, 99%, or 100% identical to the amino acid sequence of SEQ ID NO: 48, wherein the first ActRIIB polypeptide does not comprise the amino acid sequence of the second ActRIIB polypeptide. In some embodiments, the first ActRIIB polypeptide comprises an acidic amino acid position corresponding to 79 of SEQ ID NO: 2. In some embodiments, the acidic amino acid is an aspartic acid. In some embodiments, the acidic amino acid is a glutamic acid. In some embodiments, the second ActRIIB polypeptide does not comprise an acidic acid (e.g., aspartic acid or glutamic acid) at the amino acid position corresponding to 79 of SEQ ID NO: 2. In some embodiments, the second ActRIIB polypeptide comprises a leucine at the amino acid position corresponding to 79 of SEQ ID NO: 2. In some embodiments, the first ActRIIB polypeptide comprises one or more amino acid substitutions at the amino acid positions corresponding to any one of F82, A24, K74, R64, P129, P130, E37, R40, D54, R56, W78, D80, and F82 of SEQ ID NO: 2. In some embodiments, the one or more amino acid substitutions is selected from the group consisting of: A24N, K74A, R64K, R64N, K74A, L79P, P129S, P130A, P130R, E37A, R40A, D54A, R56A, K74F, K74I, K74Y, W78A, D80A, D80F, D80G, D80I, D80K, D80M, D80M, D80N, D80R, and F82A. In some embodiments, the second ActRIIB polypeptide comprises one or more amino acid substitutions at the amino acid positions corresponding to any one of F82, A24, K74, R64, P129, P130, E37, R40, D54, R56, W78, D80, and F82 of SEQ ID NO: 2. In some embodiments, the one or more amino acid substitutions is selected from the group consisting of: A24N, K74A, R64K, R64N, K74A, P129S, P130A, P130R, E37A, R40A, D54A, R56A, K74F, K74I, K74Y, W78A, D80A, D80F, D80G, D80I, D80K, D80M, D80M, D80N, D80R, and F82A. In some embodiments, the first ActRIIB polypeptide comprises one or more amino acid substitutions at the amino acid positions corresponding to any one of A24, S26, N35, E37, L38, R40, S44, L46, E50, E52, Q53, D54, K55, R56, L57, Y60, R64, N65, S67, G68, K74, W78, L79, D80, F82, N83, T93, E94, Q98, V99, E105, E106, F108, E111, R112, A119, G120, E123, P129, P130, and A132 of SEQ ID NO: 2. In some embodiments, the one or more amino acid substitutions is selected from the group consisting of: A24N, S26T, N35E, E37A, E37D, L38N, R40A, R40K, S44T, L46V, L46I, L46F, L46A, E50K, E50P, E50L, E52A, E52D, E52G, E52H, E52K, E52N, E52P, E52R, E52S, E52T, E52Y, Q53R, Q53K, Q53N, Q53H, D54A, K55A, K55D, K55E, K55R, R56A, L57E, L57I, L57R, L57T, L57V, Y60D, Y60F, Y60K, Y60P, R64A, R64H, R64K, R64N, N65A, S67N, S67T, G68R, K74A, K74E, K74F, K74I, K74R, K74Y, W78A, W78Y, L79A, L79D, L79E, L79F, L79H, L79K, L79P, L79R, L79S, L79T, L79W, D80A, D80F, D80G, D80I, D80K, D80M, D80N, D80R, F82A, F82D, F82E, F82I, F82K, F82L, F82S, F82T, F82W, F82Y, N83A, N83R, T93D, T93E, T93G, T93H, T93K, T93P, T93R, T93S, T93Y, E94K, Q98D, Q98E, Q98K, Q98R, V99E, V99G, V99K, E105N, F108I, F108L, F108V, F108Y, E111D, E111H, E111K, 111N, E111Q, E111R, R112H, R112K, R112N, R112S, R112T, A119P, A119V, G120N, E123N, P129N, P129S, P130A, P130R, and A132N.. In some embodiments, the second ActRIIB polypeptide comprises one or more amino acid substitutions at the amino acid positions corresponding to any one of L79, A24, K74, R64, P129, P130, E37, R40, D54, R56, W78, D80, and F82 of SEQ ID NO: 2. In some embodiments, the one or more amino acid substitutions is selected from the group consisting of: A24N, S26T, N35E, E37A, E37D, L38N, R40A, R40K, S44T, L46V, L46I, L46F, L46A, E50K, E50P, E50L, E52A, E52D, E52G, E52H, E52K, E52N, E52P, E52R, E52S, E52T, E52Y, Q53R, Q53K, Q53N, Q53H, D54A, K55A, K55D, K55E, K55R, R56A, L57E, L57I, L57R, L57T, L57V, Y60D, Y60F, Y60K, Y60P, R64A, R64H, R64K, R64N, N65A, S67N, S67T, G68R, K74A, K74E, K74F, K74I, K74R, K74Y, W78A, W78Y, L79A, L79D, L79E, L79F, L79H, L79K, L79P, L79R, L79S, L79T, L79W, D80A, D80F, D80G, D80I, D80K, D80M, D80N, D80R, F82A, F82D, F82E, F82I, F82K, F82L, F82S, F82T, F82W, F82Y, N83A, N83R, T93D, T93E, T93G, T93H, T93K, T93P, T93R, T93S, T93Y, E94K, Q98D, Q98E, Q98K, Q98R, V99E, V99G, V99K, E105N, F108I, F108L, F108V, F108Y, E111D, E111H, E111K, 111N, E111Q, E111R, R112H, R112K, R112N, R112S, R112T, A119P, A119V, G120N, E123N, P129N, P129S, P130A, P130R, and A132N. In some embodiments, the first ActRIIB polypeptide and/or the second ActRIIB polypeptide comprise one or more amino acid modifications that promote heteromultimer formation. In some embodiments, the first ActRIIB polypeptide and/or the second ActRIIB polypeptide comprise one or more amino acid modifications that inhibit heteromultimer formation. In some embodiments, the heteromultimer is a heterodimer.

[0292] In certain aspects, the disclosure relates to a heteromultimer comprising a first ActRIIB polypeptide that is at least 75%, 80%, 85%, 90%, 91%, 92%, 93%, 94%, 95%, 96%, 97%, 98%, 99%, or 100% identical to the amino acid sequence of SEQ ID NO: 50, and second ActRIIB polypeptide that is at least 75%, 80%, 85%, 90%, 91%, 92%, 93%, 94%, 95%, 96%, 97%, 98%, 99%, or 100% identical to the amino acid sequence of SEQ ID NO: 52, wherein the first ActRIIB polypeptide does not comprise the amino acid sequence of the second ActRIIB polypeptide. In some embodiments, the first ActRIIB polypeptide comprises an acidic amino acid position corresponding to 79 of SEQ ID NO: 2. In some embodiments, the acidic amino acid is an aspartic acid. In some embodiments, the acidic amino acid is a glutamic acid. In some embodiments, the second ActRIIB polypeptide does not comprise an acidic acid (e.g., aspartic acid or glutamic acid) at the amino acid position corresponding to 79 of SEQ ID NO: 2. In some embodiments, the second ActRIIB polypeptide comprises a leucine at the amino acid position corresponding to 79 of SEQ ID NO: 2. In some embodiments, the first ActRIIB polypeptide comprises one or more amino acid substitutions at the amino acid positions corresponding to any one of F82, A24, K74, R64, P129, P130, E37, R40, D54, R56, W78, D80, and F82 of SEQ ID NO: 2. In some embodiments, the one or more amino acid substitutions is selected from the group consisting of: A24N, K74A, R64K, R64N, K74A, L79P, P129S, P130A, P130R, E37A, R40A, D54A, R56A, K74F, K74I, K74Y, W78A, D80A, D80F, D80G, D80I, D80K, D80M, D80M, D80N, D80R, and F82A. In some embodiments, the second ActRIIB polypeptide comprises one or more amino acid substitutions at the amino acid positions corresponding to any one of F82, A24, K74, R64, P129, P130, E37, R40, D54, R56, W78, D80, and F82 of SEQ ID NO: 2. In some embodiments, the one or more amino acid substitutions is selected from the group consisting of: A24N, K74A, R64K, R64N, K74A, P129S, P130A, P130R, E37A, R40A, D54A, R56A, K74F, K74I, K74Y, W78A, D80A, D80F, D80G, D80I, D80K, D80M, D80M, D80N, D80R, and F82A. In some embodiments, the first ActRIIB polypeptide comprises one or more amino acid substitutions at the amino acid positions corresponding to any one of A24, S26, N35, E37, L38, R40, S44, L46, E50, E52, Q53, D54, K55, R56, L57, Y60, R64, N65, S67, G68, K74, W78, L79, D80, F82, N83, T93, E94, Q98, V99, E105, E106, F108, E111, R112, A119, G120, E123, P129, P130, and A132 of SEQ ID NO: 2. In some embodiments, the one or more amino acid substitutions is selected from the group consisting of: A24N, S26T, N35E, E37A, E37D, L38N, R40A, R40K, S44T, L46V, L46I, L46F, L46A, E50K, E50P, E50L, E52A, E52D, E52G, E52H, E52K, E52N, E52P, E52R, E52S, E52T, E52Y, Q53R, Q53K, Q53N, Q53H, D54A, K55A, K55D, K55E, K55R, R56A, L57E, L57I, L57R, L57T, L57V, Y60D, Y60F, Y60K, Y60P, R64A, R64H, R64K, R64N, N65A, S67N, S67T, G68R, K74A, K74E, K74F, K74I, K74R, K74Y, W78A, W78Y, L79A, L79D, L79E, L79F, L79H, L79K, L79P, L79R, L79S, L79T, L79W, D80A, D80F, D80G, D80I, D80K, D80M, D80N, D80R, F82A, F82D, F82E, F82I, F82K, F82L, F82S, F82T, F82W, F82Y, N83A, N83R, T93D, T93E, T93G, T93H, T93K, T93P, T93R, T93S, T93Y, E94K, Q98D, Q98E, Q98K, Q98R, V99E, V99G, V99K, E105N, F108I, F108L, F108V, F108Y, E111D, E111H, E111K, 111N, E111Q, E111R, R112H, R112K, R112N, R112S, R112T, A119P, A119V, G120N, E123N, P129N, P129S, P130A, P130R, and A132N.. In some embodiments, the second ActRIIB polypeptide comprises one or more amino acid substitutions at the amino acid positions corresponding to any one of L79, A24, K74, R64, P129, P130, E37, R40, D54, R56, W78, D80, and F82 of SEQ ID NO: 2. In some embodiments, the one or more amino acid substitutions is selected from the group consisting of: A24N, S26T, N35E, E37A, E37D, L38N, R40A, R40K, S44T, L46V, L46I, L46F, L46A, E50K, E50P, E50L, E52A, E52D, E52G, E52H, E52K, E52N, E52P, E52R, E52S, E52T, E52Y, Q53R, Q53K, Q53N, Q53H, D54A, K55A, K55D, K55E, K55R, R56A, L57E, L57I, L57R, L57T, L57V, Y60D, Y60F, Y60K, Y60P, R64A, R64H, R64K, R64N, N65A, S67N, S67T, G68R, K74A, K74E, K74F, K74I, K74R, K74Y, W78A, W78Y, L79A, L79D, L79E, L79F, L79H, L79K, L79P, L79R, L79S, L79T, L79W, D80A, D80F, D80G, D80I, D80K, D80M, D80N, D80R, F82A, F82D, F82E, F82I, F82K, F82L, F82S, F82T, F82W, F82Y, N83A, N83R, T93D, T93E, T93G, T93H, T93K, T93P, T93R, T93S, T93Y, E94K, Q98D, Q98E, Q98K, Q98R, V99E, V99G, V99K, E105N, F108I, F108L, F108V, F108Y, E111D, E111H, E111K, 111N, E111Q, E111R, R112H, R112K, R112N, R112S, R112T, A119P, A119V, G120N, E123N, P129N, P129S, P130A, P130R, and A132N. In some embodiments, the first ActRIIB polypeptide and/or the second ActRIIB polypeptide comprise one or more amino acid modifications that promote heteromultimer formation. In some embodiments, the first ActRIIB polypeptide and/or the second ActRIIB polypeptide comprise one or more amino acid modifications that inhibit heteromultimer formation. In some embodiments, the heteromultimer is a heterodimer. In certain embodiments, the disclosure relates to a heteromultimer comprising a first variant ActRIIB-Fc fusion protein and a second variant ActRIIB-Fc fusion protein, wherein the second variant ActRIIB-Fc fusion protein differs from that present in the first polypeptide. In some embodiments, an ActRIIB-Fc:ActRIIB-Fc heteromultimers binds to one or more TGF-beta superfamily ligands such as those described herein. In some embodiments, an ActRIIB-Fc:ActRIIB-Fc heteromultimers inhibit signaling of one or more TGF-beta superfamily ligands such as those described herein. In some embodiments, an ActRIIB-Fc:ActRIIB-Fc heteromultimers is a heterodimer.

[0293] In certain embodiments, the disclosure relates to a heteromultimer comprising at least one ALK7-Fc fusion protein and at least one ActRIIB-Fc fusion protein. In some embodiments, an ALK7-Fc:ActRIIB-Fc heteromultimers binds to one or more TGF-beta superfamily ligands such as those described herein. In some embodiments, an ALK7-Fc:ActRIIB-Fc heteromultimers inhibit signaling of one or more TGF-beta superfamily ligands such as those described herein. In some embodiments, an ALK7-Fc:ActRIIB-Fc heteromultimers is a heterodimer.

[0294] In certain embodiments, the disclosure relates to a heteromultimer comprising at least one ALK4-Fc fusion protein and at least one ActRIIB-Fc fusion protein. In some embodiments, an ALK4-Fc:ActRIIB-Fc heteromultimers binds to one or more TGF-beta superfamily ligands such as those described herein. In some embodiments, an ALK4-Fc:ActRIIB-Fc heteromultimers inhibit signaling of one or more TGF-beta superfamily ligands such as those described herein. In some embodiments, an ALK4-Fc:ActRIIB-Fc heteromultimers is a heterodimer.

[0295] In certain aspects, the present disclosure relates to protein complexes that comprise an ALK4 polypeptide. As used herein, the term “ALK4” refers to a family of activin receptor-like kinase-4 proteins from any species and variants derived from such ALK4 proteins by mutagenesis or other modification. Reference to ALK4 herein is understood to be a reference to any one of the currently identified forms. Members of the ALK4 family are generally transmembrane proteins, composed of a ligand-binding extracellular domain with a cysteine-rich region, a transmembrane domain, and a cytoplasmic domain with predicted serine/threonine kinase activity.

[0296] The term “ALK4 polypeptide” includes polypeptides comprising any naturally occurring polypeptide of an ALK4 family member as well as any variants thereof (including mutants, fragments, fusions, and peptidomimetic forms) that retain a useful activity.

[0297] A human ALK4 precursor protein sequence (NCBI Ref Seq NP_004293) is as follows:

1 MAESAGASSF FPLVVLLLAG SGGSGPRGVQ ALLCACTSCL QANYTCETDG ACMVSIFNLD
61 GMEHHVRTCI PKVELVPAGK PFYCLSSEDL RNTHCCYTDY CNRIDLRVPS GHLKEPEHPS
121 MWGPVELVGI IAGPVFLLFL IIIIVFLVIN YHQRVYHNRQ RLDMEDPSCE MCLSKDKTLQ
181 DLVYDLSTSG SGSGLPLFVQ RTVARTIVLQ EIIGKGRFGE VWRGRWRGGD VAVKIFSSRE
241 ERSWFREAEI YQTVMLRHEN ILGFIAADNK DNGTWTQLWL VSDYHEHGSL FDYLNRYTVT
301 IEGMIKLALS AASGLAHLHM EIVGTQGKPG IAHRDLKSKN ILVKKNGMCA IADLGLAVRH
361 DAVTDTIDIA PNQRVGTKRY MAPEVLDETI NMKHFDSFKC ADIYALGLVY WEIARRCNSG
421 GVHEEYQLPY YDLVPSDPSI EEMRKVVCDQ KLRPNIPNWW QSYEALRVMG KMMRECWYAN
481 GAARLTALRI KKTLSQLSVQ EDVKI (SEQ ID NO: 84)

[0298] The signal peptide is indicated by a single underline and the extracellular domain is indicated in bold font.

[0299] A processed extracellular human ALK4 polypeptide sequence is as follows:

SGPRGVQALLCACTSCLQANYTCETDGACMVSIFNLDGMEHHVRTCIPKV
ELVPAGKPFYCLSSEDLRNTHCCYTDYCNRIDLRVPSGHLKEPEHPSMWG
PVE (SEQ ID NO: 86)

[0300] A nucleic acid sequence encoding an ALK4 precursor protein is shown in SEQ ID NO: 221), corresponding to nucleotides 78-1592 of Genbank Reference Sequence NM_004302.4. A nucleic acid sequence encoding the extracellular ALK4 polypeptide is shown in SEQ ID NO: 222.

[0301] An alternative isoform of human ALK4 precursor protein sequence, isoform C (NCBI Ref Seq NP_064733.3), is as follows:

1 MAESAGASSF FPLVVLLLAG SGGSGPRGVQ ALLCACTSCL QANYTCETDG ACMVSIFNLD
61 GMEHHVRTCI PKVELVPAGK PFYCLSSEDL RNTHCCYTDY CNRIDLRVPS GHLKEPEHPS
121 MWGPVELVGI IAGPVFLLFL IIIIVFLVIN YHQRVYHNRQ RLDMEDPSCE MCLSKDKTLQ
181 DLVYDLSTSG SGSGLPLFVQ RTVARTIVLQ EIIGKGRFGE VWRGRWRGGD VAVKIFSSRE
241 ERSWFREAEI YQTVMLRHEN ILGFIAADNK ADCSFLTLPW EVVMVSAAPK LRSLRLQYKG
301 GRGRARFLFP LNNGTWTQLW LVSDYHEHGS LFDYLNRYTV TIEGMIKLAL SAASGLAHLH
361 MEIVGTQGKP GIAHRDLKSK NILVKKNGMC AIADLGLAVR HDAVTDTIDI APNQRVGTKR
421 YMAPEVLDET INMKHFDSFK CADIYALGLV YWEIARRCNS GGVHEEYQLP YYDLVPSDPS
481 IEEMRKVVCD QKLRPNIPNW WQSYEALRVM GKMMRECWYA NGAARLTALR IKKTLSQLSV
541 QEDVKI (SEQ ID NO: 85)

[0302] The signal peptide is indicated by a single underline and the extracellular domain is indicated in bold font.

[0303] A processed extracellular ALK4 polypeptide sequence (isoform C) is as follows:

SGPRGVQALLCACTSCLQANYTCETDGACMVSIFNLDGMEHHVRTCIPKV
ELVPAGKPFYCLSSEDLRNTHCCYTDYCNRIDLRVPSGHLKEPEHPSMWG
PVE (SEQ ID NO: 87)

[0304] A nucleic acid sequence encoding an ALK4 precursor protein (isoform C) is shown in SEQ ID NO: 223, corresponding to nucleotides 78-1715 of Genbank Reference Sequence NM_020328.3. A nucleic acid sequence encoding the extracellular ALK4 polypeptide (isoform C) is shown in SEQ ID NO: 224.

[0305] In certain embodiments, the disclosure relates to heteromultimers that comprise at least one ALK4 polypeptide, which includes fragments, functional variants, and modified forms thereof. Preferably, ALK4 polypeptides for use as disclosed herein (e.g., heteromultimers comprising an ALK4 polypeptide and uses thereof) are soluble (e.g., an extracellular domain of ALK4). In other preferred embodiments, ALK4 polypeptides for use as disclosed herein bind to and/or inhibit (antagonize) activity (e.g., induction of Smad signaling) of one or more TGF-beta superfamily ligands. In some embodiments, heteromultimers of the disclosure comprise at least one ALK4 polypeptide that is at least 70%, 75%, 80%, 85%, 90%, 91%, 92%, 93%, 94%, 95%, 96%, 97%, 98%, 99%, or 100% identical to the amino acid sequence of SEQ ID NO: 84, 85, 86, 87, 88, 89, 92, or 93. In some embodiments, heteromultimers of the disclosure consist or consist essentially of at least one ALK4 polypeptide that is at least 70%, 75%, 80%, 85%, 90%, 91%, 92%, 93%, 94%, 95%, 96%, 97%, 98%, 99%, or 100% identical to the amino acid sequence of SEQ ID NO: 84, 85, 86, 87, 88, 89, 92, or 93.

[0306] In certain aspects, the disclosure relates to a heteromultimer that comprises an ALK4-Fc fusion protein. In some embodiments, the ALK4-Fc fusion protein comprises an ALK4 domain comprising an amino acid sequence that is at least 70%, 75%, 80%, 85%, 86%, 87%, 88%, 89%, 90%, 91%, 92%, 93%, 94%, 95%, 96%, 97%, 98%, 99%, or 100% identical to an amino acid sequence that begins at any one of amino acids 23-34 (e.g., amino acid residues 23, 24, 25, 26, 27, 28, 29, 30, 31, 32, 33, 34) SEQ ID NO: 84 or 85, and ends at any one of amino acids 101-126 (e.g., amino acid residues 101, 102, 103, 104, 105, 106, 107, 108, 109, 110, 111, 112, 113, 114, 115, 116, 117, 118, 119, 120, 121, 122, 123, 124, 125, and 126) of SEQ ID NO: 84 or 85. In some embodiments, the ALK4-Fc fusion protein comprises an ALK4 domain comprising an amino acid sequence that is at least 70%, 75%, 80%, 85%, 86%, 87%, 88%, 89%, 90%, 91%, 92%, 93%, 94%, 95%, 96%, 97%, 98%, 99%, or 100% identical to amino acids 34-101 of SEQ ID NOs: 84 or 85. In some embodiments, the ALK4-Fc fusion protein comprises an ALK4 domain comprising an amino acid sequence that is at least 70%, 75%, 80%, 85%, 86%, 87%, 88%, 89%, 90%, 91%, 92%, 93%, 94%, 95%, 96%, 97%, 98%, 99%, or 100% identical to amino acids 23-126 of SEQ ID Nos: 84 or 85. In some embodiments, the ALK4-Fc fusion protein comprises an ALK4 domain comprising an amino acid sequence that is at least 70%, 75%, 80%, 85%, 86%, 87%, 88%, 89%, 90%, 91%, 92%, 93%, 94%, 95%, 96%, 97%, 98%, 99%, or 100% identical to the amino acid sequence of any one of SEQ ID Nos: 84, 86, 85, 87, 88, 89, 90, 91, 92, 93, 94, and 95.

[0307] In certain embodiments, the polypeptide comprises an ALK4-Fc fusion polypeptide (SEQ ID NO: 88) as follows:

1 MDAMKRGLCC VLLLCGAVFV SPGASGPRGV QALLCACTSC LQANYTCETD
51 GACMVSIFNL DGMEHHVRTC IPKVELVPAG KPFYCLSSED LRNTHCCYTD
101 YCNRIDLRVP SGHLKEPEHP SMWGPVETGG GTHTCPPCPA PELLGGPSVF
151 LFPPKPKDTL MISRTPEVTC VVVDVSHEDP EVKFNWYVDG VEVHNAKTKP
201 REEQYNSTYR VVSVLTVLHQ DWLNGKEYKC KVSNKALPAP IEKTISKAKG
251 QPREPQVYTL PPSREEMTKN QVSLTCLVKG FYPSDIAVEW ESNGQPENNY
301 DTTPPVLDSD GSFFLYSDLT VDKSRWQQGN VFSCSVMHEA LHNHYTQKSL
351 SLSPG (SEQ ID NO: 88)

[0308] The leader sequence and linker sequence are underlined. To guide heterodimer formation with certain Fc fusion polypeptides of the disclosure, two amino acid substitutions (replacing lysines with aspartic acids) can be introduced into the Fc domain of the ALK4-Fc fusion polypeptide as indicated by double underline above. The amino acid sequence of SEQ ID NO: 88 may optionally be provided with lysine added at the C-terminus.

[0309] This ALK4-Fc fusion protein is encoded by the following nucleic acid (SEQ ID NO: 243):

1 ATGGATGCAA TGAAGAGAGG GCTCTGCTGT GTGCTGCTGC TGTGTGGAGC
51 AGTCTTCGTT TCGCCCGGCG CCTCCGGGCC CCGGGGGGTC CAGGCTCTGC
101 TGTGTGCGTG CACCAGCTGC CTCCAGGCCA ACTACACGTG TGAGACAGAT
151 GGGGCCTGCA TGGTTTCCAT TTTCAATCTG GATGGGATGG AGCACCATGT
201 GCGCACCTGC ATCCCCAAAG TGGAGCTGGT CCCTGCCGGG AAGCCCTTCT
251 ACTGCCTGAG CTCGGAGGAC CTGCGCAACA CCCACTGCTG CTACACTGAC
301 TACTGCAACA GGATCGACTT GAGGGTGCCC AGTGGTCACC TCAAGGAGCC
351 TGAGCACCCG TCCATGTGGG GCCCGGTGGA GACCGGTGGT GGAACTCACA
401 CATGCCCACC GTGCCCAGCA CCTGAACTCC TGGGGGGACC GTCAGTCTTC
451 CTCTTCCCCC CAAAACCCAA GGACACCCTC ATGATCTCCC GGACCCCTGA
501 GGTCACATGC GTGGTGGTGG ACGTGAGCCA CGAAGACCCT GAGGTCAAGT
551 TCAACTGGTA CGTGGACGGC GTGGAGGTGC ATAATGCCAA GACAAAGCCG
601 CGGGAGGAGC AGTACAACAG CACGTACCGT GTGGTCAGCG TCCTCACCGT
651 CCTGCACCAG GACTGGCTGA ATGGCAAGGA GTACAAGTGC AAGGTCTCCA
701 ACAAAGCCCT CCCAGCCCCC ATCGAGAAAA CCATCTCCAA AGCCAAAGGG
751 CAGCCCCGAG AACCACAGGT GTACACCCTG CCCCCATCCC GGGAGGAGAT
801 GACCAAGAAC CAGGTCAGCC TGACCTGCCT GGTCAAAGGC TTCTATCCCA
851 GCGACATCGC CGTGGAGTGG GAGAGCAATG GGCAGCCGGA GAACAACTAC
901 GACACCACGC CTCCCGTGCT GGACTCCGAC GGCTCCTTCT TCCTCTATAG
951 CGACCTCACC GTGGACAAGA GCAGGTGGCA GCAGGGGAAC GTCTTCTCAT
1001 GCTCCGTGAT GCATGAGGCT CTGCACAACC ACTACACGCA GAAGAGCCTC
1051 TCCCTGTCTC CGGGT (SEQ ID NO: 243)

[0310] The mature ALK4-Fc fusion protein sequence (SEQ ID NO: 89) is as follows and may optionally be provided with lysine added at the C-terminus.

1 SGPRGVQALL CACTSCLQAN YTCETDGACM VSIFNLDGME HHVRTCIPKV
51 ELVPAGKPFY CLSSEDLRNT HCCYTDYCNR IDLRVPSGHL KEPEHPSMWG
101 PVETGGGTHT CPPCPAPELL GGPSVFLFPP KPKDTLMISR TPEVTCVVVD
151 VSHEDPEVKF NWYVDGVEVH NAKTKPREEQ YNSTYRVVSV LTVLHQDWLN
201 GKEYKCKVSN KALPAPIEKT ISKAKGQPRE PQVYTLPPSR EEMTKNQVSL
251 TCLVKGFYPS DIAVEWESNG QPENNYDTTP PVLDSDGSFF LYSDLTVDKS
301 RWQQGNVFSC SVMHEALHNH YTQKSLSLSP G (SEQ ID NO: 89)

[0311] In some embodiments, the ALK4-Fc fusion polypeptide (or any Fc fusion polypeptide disclosed herein) employs the tissue plasminogen activator (TPA)leader:

MDAMKRGLCCVLLLCGAVFVSP (SEQ ID NO: 246).

[0312] In some embodiments, the ALK4-Fc fusion polypeptide (SEQ ID NO: 92) is as follows and may optionally be provided with lysine removed from the C-terminus.

1 MDAMKRGLCC VLLLCGAVFV SPGASGPRGV QALLCACTSC LQANYTCETD
51 GACMVSIFNL DGMEHHVRTC IPKVELVPAG KPFYCLSSED LRNTHCCYTD
101 YCNRIDLRVP SGHLKEPEHP SMWGPVETGG GTHTCPPCPA PELLGGPSVF
151 LFPPKPKDTL MISRTPEVTC VVVDVSHEDP EVKFNWYVDG VEVHNAKTKP
201 REEQYNSTYR VVSVLTVLHQ DWLNGKEYKC KVSNKALPAP IEKTISKAKG
251 QPREPQVCTL PPSREEMTKN QVSLSCAVKG FYPSDIAVEW ESNGQPENNY
301 KTTPPVLDSD GSFFLVSKLT VDKSRWQQGN VFSCSVMHEA LHNHYTQKSL
351 SLSPGK (SEQ ID NO: 92)

[0313] The leader sequence and the linker are underlined. To guide heterodimer formation with certain Fc fusion polypeptides disclosed herein, four amino acid substitutions can be introduced into the Fc domain of the ALK4 fusion polypeptide as indicated by double underline above. The amino acid sequence of SEQ ID NO: 92 may optionally be provided with lysine removed from the C-terminus.

[0314] The mature ALK4-Fc fusion protein sequence is as follows and may optionally be provided with lysine removed from the C-terminus.

1 SGPRGVQALL CACTSCLQAN YTCETDGACM VSIFNLDGME HHVRTCIPKV
51 ELVPAGKPFY CLSSEDLRNT HCCYTDYCNR IDLRVPSGHL KEPEHPSMWG
101 PVETGGGTHT CPPCPAPELL GGPSVFLFPP KPKDTLMISR TPEVTCVVVD
151 VSHEDPEVKF NWYVDGVEVH NAKTKPREEQ YNSTYRVVSV LTVLHQDWLN
201 GKEYKCKVSN KALPAPIEKT ISKAKGQPRE PQVCTLPPSR EEMTKNQVSL
251 SCAVKGFYPS DIAVEWESNG QPENNYKTTP PVLDSDGSFF LVSKLTVDKS
301 RWQQGNVFSC SVMHEALHNH YTQKSLSLSP GK (SEQ ID NO: 93)

[0315] Purification of various ActRIIB-Fc:ALK4-Fc complexes could be achieved by a series of column chromatography steps, including, for example, three or more of the following, in any order: protein A chromatography, Q sepharose chromatography, phenylsepharose chromatography, size exclusion chromatography, and cation exchange chromatography. The purification could be completed with viral filtration and buffer exchange.

[0316] In some embodiments, the ALK4-Fc fusion polypeptide (SEQ ID NO: 247) is as follows and may optionally be provided with lysine removed from the C-terminus.

1 MDAMKRGLCC VLLLCGAVFV SPGASGPRGV QALLCACTSC LQANYTCETD
51 GACMVSIFNL DGMEHHVRTC IPKVELVPAG KPFYCLSSED LRNTHCCYTD
101 YCNRIDLRVP SGHLKEPEHP SMWGPVETGG GTHTCPPCPA PELLGGPSVF
151 LFPPKPKDTL MISRTPEVTC VVVDVSHEDP EVKFNWYVDG VEVHNAKTKP
201 REEQYNSTYR VVSVLTVLHQ DWLNGKEYKC KVSNKALPAP IEKTISKAKG
251 QPREPQVCTL PPSREEMTKN QVSLSCAVKG FYPSDIAVEW ESRGQPENNY
301 KTTPPVLDSR GSFFLVSKLT VDKSRWQQGN VFSCSVMHEA LHNHYTQKSL
351 SLSPGK (SEQ ID NO: 247)

[0317] The leader sequence and the linker are underlined. To guide heterodimer formation with certain Fc fusion polypeptides disclosed herein, four amino acid substitutions (replacing a tyrosine with a cysteine, a threonine with a serine, a leucine with an alanine, and a tyrosine with a valine) can be introduced into the Fc domain of the ALK4 fusion polypeptide as indicated by double underline above. To facilitate purification of the ALK4-Fc:ActRIIB-Fc heterodimer, two amino acid substitutions (replacing an asparagine with an arginine and an aspartate with an arginine) can also be introduced into the Fc domain of the ALK4-Fc fusion polypeptide as indicated by double underline above. The amino acid sequence of SEQ ID NO: 247 may optionally be provided with lysine removed from the C-terminus.

[0318] This ALK4-Fc fusion polypeptide is encoded by the following nucleic acid (SEQ ID NO: 248):

1 ATGGATGCAA TGAAGAGAGG GCTCTGCTGT GTGCTGCTGC TGTGTGGAGC
51 AGTCTTCGTT TCGCCCGGCG CCTCCGGGCC CCGGGGGGTC CAGGCTCTGC
101 TGTGTGCGTG CACCAGCTGC CTCCAGGCCA ACTACACGTG TGAGACAGAT
151 GGGGCCTGCA TGGTTTCCAT TTTCAATCTG GATGGGATGG AGCACCATGT
201 GCGCACCTGC ATCCCCAAAG TGGAGCTGGT CCCTGCCGGG AAGCCCTTCT
251 ACTGCCTGAG CTCGGAGGAC CTGCGCAACA CCCACTGCTG CTACACTGAC
301 TACTGCAACA GGATCGACTT GAGGGTGCCC AGTGGTCACC TCAAGGAGCC
351 TGAGCACCCG TCCATGTGGG GCCCGGTGGA GACCGGTGGT GGAACTCACA
401 CATGCCCACC GTGCCCAGCA CCTGAACTCC TGGGGGGACC GTCAGTCTTC
451 CTCTTCCCCC CAAAACCCAA GGACACCCTC ATGATCTCCC GGACCCCTGA
501 GGTCACATGC GTGGTGGTGG ACGTGAGCCA CGAAGACCCT GAGGTCAAGT
551 TCAACTGGTA CGTGGACGGC GTGGAGGTGC ATAATGCCAA GACAAAGCCG
601 CGGGAGGAGC AGTACAACAG CACGTACCGT GTGGTCAGCG TCCTCACCGT
651 CCTGCACCAG GACTGGCTGA ATGGCAAGGA GTACAAGTGC AAGGTCTCCA
701 ACAAAGCCCT CCCAGCCCCC ATCGAGAAAA CCATCTCCAA AGCCAAAGGG
751 CAGCCCCGAG AACCACAGGT GTGCACCCTG CCCCCATCCC GGGAGGAGAT
801 GACCAAGAAC CAGGTCAGCC TGTCCTGCGC CGTCAAAGGC TTCTATCCCA
851 GCGACATCGC CGTGGAGTGG GAGAGCCGCG GGCAGCCGGA GAACAACTAC
901 AAGACCACGC CTCCCGTGCT GGACTCCCGC GGCTCCTTCT TCCTCGTGAG
951 CAAGCTCACC GTGGACAAGA GCAGGTGGCA GCAGGGGAAC GTCTTCTCAT
1001 GCTCCGTGAT GCATGAGGCT CTGCACAACC ACTACACGCA GAAGAGCCTC
1051 TCCCTGTCTC CGGGTAAA (SEQ ID NO: 248)

[0319] The mature ALK4-Fc fusion polypeptide sequence is as follows (SEQ ID NO: 249) and may optionally be provided with lysine removed from the C-terminus.

1 SGPRGVQALL CACTSCLQAN YTCETDGACM VSIFNLDGME HHVRTCIPKV
51 ELVPAGKPFY CLSSEDLRNT HCCYTDYCNR IDLRVPSGHL KEPEHPSMWG
101 PVETGGGTHT CPPCPAPELL GGPSVFLFPP KPKDTLMISR TPEVTCVVVD
151 VSHEDPEVKF NWYVDGVEVH NAKTKPREEQ YNSTYRVVSV LTVLHQDWLN
201 GKEYKCKVSN KALPAPIEKT ISKAKGQPRE PQVCTLPPSR EEMTKNQVSL
251 SCAVKGFYPS DIAVEWESRG QPENNYKTTP PVLDSRGSFF LVSKLTVDKS
301 RWQQGNVFSC SVMHEALHNH YTQKSLSLSP GK (SEQ ID NO: 249)

[0320] This ALK4-Fc fusion polypeptide is encoded by the following nucleic acid (SEQ ID NO: 250):

1 TCCGGGCCCC GGGGGGTCCA GGCTCTGCTG TGTGCGTGCA CCAGCTGCCT
51 CCAGGCCAAC TACACGTGTG AGACAGATGG GGCCTGCATG GTTTCCATTT
101 TCAATCTGGA TGGGATGGAG CACCATGTGC GCACCTGCAT CCCCAAAGTG
151 GAGCTGGTCC CTGCCGGGAA GCCCTTCTAC TGCCTGAGCT CGGAGGACCT
201 GCGCAACACC CACTGCTGCT ACACTGACTA CTGCAACAGG ATCGACTTGA
251 GGGTGCCCAG TGGTCACCTC AAGGAGCCTG AGCACCCGTC CATGTGGGGC
301 CCGGTGGAGA CCGGTGGTGG AACTCACACA TGCCCACCGT GCCCAGCACC
351 TGAACTCCTG GGGGGACCGT CAGTCTTCCT CTTCCCCCCA AAACCCAAGG
401 ACACCCTCAT GATCTCCCGG ACCCCTGAGG TCACATGCGT GGTGGTGGAC
451 GTGAGCCACG AAGACCCTGA GGTCAAGTTC AACTGGTACG TGGACGGCGT
501 GGAGGTGCAT AATGCCAAGA CAAAGCCGCG GGAGGAGCAG TACAACAGCA
551 CGTACCGTGT GGTCAGCGTC CTCACCGTCC TGCACCAGGA CTGGCTGAAT
601 GGCAAGGAGT ACAAGTGCAA GGTCTCCAAC AAAGCCCTCC CAGCCCCCAT
651 CGAGAAAACC ATCTCCAAAG CCAAAGGGCA GCCCCGAGAA CCACAGGTGT
701 GCACCCTGCC CCCATCCCGG GAGGAGATGA CCAAGAACCA GGTCAGCCTG
751 TCCTGCGCCG TCAAAGGCTT CTATCCCAGC GACATCGCCG TGGAGTGGGA
801 GAGCCGCGGG CAGCCGGAGA ACAACTACAA GACCACGCCT CCCGTGCTGG
851 ACTCCCGCGG CTCCTTCTTC CTCGTGAGCA AGCTCACCGT GGACAAGAGC
901 AGGTGGCAGC AGGGGAACGT CTTCTCATGC TCCGTGATGC ATGAGGCTCT
951 GCACAACCAC TACACGCAGA AGAGCCTCTC CCTGTCTCCG GGTAAA
(SEQ ID NO: 250)

[0321] In certain embodiments, the ALK4-Fc fusion polypeptide is SEQ ID NO: 92 (shown above), which contains four amino acid substitutions to guide heterodimer formation certain Fc fusion polypeptides disclosed herein, and may optionally be provided with lysine removed from the C-terminus.

[0322] This ALK4-Fc fusion polypeptide is encoded by the following nucleic acid (SEQ ID NO: 251):

1 ATGGATGCAA TGAAGAGAGG GCTCTGCTGT GTGCTGCTGC TGTGTGGAGC
51 AGTCTTCGTT TCGCCCGGCG CCTCCGGGCC CCGGGGGGTC CAGGCTCTGC
101 TGTGTGCGTG CACCAGCTGC CTCCAGGCCA ACTACACGTG TGAGACAGAT
151 GGGGCCTGCA TGGTTTCCAT TTTCAATCTG GATGGGATGG AGCACCATGT
201 GCGCACCTGC ATCCCCAAAG TGGAGCTGGT CCCTGCCGGG AAGCCCTTCT
251 ACTGCCTGAG CTCGGAGGAC CTGCGCAACA CCCACTGCTG CTACACTGAC
301 TACTGCAACA GGATCGACTT GAGGGTGCCC AGTGGTCACC TCAAGGAGCC
351 TGAGCACCCG TCCATGTGGG GCCCGGTGGA GACCGGTGGT GGAACTCACA
401 CATGCCCACC GTGCCCAGCA CCTGAACTCC TGGGGGGACC GTCAGTCTTC
451 CTCTTCCCCC CAAAACCCAA GGACACCCTC ATGATCTCCC GGACCCCTGA
501 GGTCACATGC GTGGTGGTGG ACGTGAGCCA CGAAGACCCT GAGGTCAAGT
551 TCAACTGGTA CGTGGACGGC GTGGAGGTGC ATAATGCCAA GACAAAGCCG
601 CGGGAGGAGC AGTACAACAG CACGTACCGT GTGGTCAGCG TCCTCACCGT
651 CCTGCACCAG GACTGGCTGA ATGGCAAGGA GTACAAGTGC AAGGTCTCCA
701 ACAAAGCCCT CCCAGCCCCC ATCGAGAAAA CCATCTCCAA AGCCAAAGGG
751 CAGCCCCGAG AACCACAGGT GTGCACCCTG CCCCCATCCC GGGAGGAGAT
801 GACCAAGAAC CAGGTCAGCC TGTCCTGCGC CGTCAAAGGC TTCTATCCCA
851 GCGACATCGC CGTGGAGTGG GAGAGCAATG GGCAGCCGGA GAACAACTAC
901 AAGACCACGC CTCCCGTGCT GGACTCCGAC GGCTCCTTCT TCCTCGTGAG
951 CAAGCTCACC GTGGACAAGA GCAGGTGGCA GCAGGGGAAC GTCTTCTCAT
1001 GCTCCGTGAT GCATGAGGCT CTGCACAACC ACTACACGCA GAAGAGCCTC
1051 TCCCTGTCTC CGGGTAAA (SEQ ID NO: 251)

[0323] The mature ALK4-Fc fusion polypeptide sequence is SEQ ID NO: 93 (shown above) and may optionally be provided with lysine removed from the C-terminus.

[0324] This ALK4-Fc fusion polypeptide is encoded by the following nucleic acid (SEQ ID NO: 252):

1 TCCGGGCCCC GGGGGGTCCA GGCTCTGCTG TGTGCGTGCA CCAGCTGCCT
51 CCAGGCCAAC TACACGTGTG AGACAGATGG GGCCTGCATG GTTTCCATTT
101 TCAATCTGGA TGGGATGGAG CACCATGTGC GCACCTGCAT CCCCAAAGTG
151 GAGCTGGTCC CTGCCGGGAA GCCCTTCTAC TGCCTGAGCT CGGAGGACCT
201 GCGCAACACC CACTGCTGCT ACACTGACTA CTGCAACAGG ATCGACTTGA
251 GGGTGCCCAG TGGTCACCTC AAGGAGCCTG AGCACCCGTC CATGTGGGGC
301 CCGGTGGAGA CCGGTGGTGG AACTCACACA TGCCCACCGT GCCCAGCACC
351 TGAACTCCTG GGGGGACCGT CAGTCTTCCT CTTCCCCCCA AAACCCAAGG
401 ACACCCTCAT GATCTCCCGG ACCCCTGAGG TCACATGCGT GGTGGTGGAC
451 GTGAGCCACG AAGACCCTGA GGTCAAGTTC AACTGGTACG TGGACGGCGT
501 GGAGGTGCAT AATGCCAAGA CAAAGCCGCG GGAGGAGCAG TACAACAGCA
551 CGTACCGTGT GGTCAGCGTC CTCACCGTCC TGCACCAGGA CTGGCTGAAT
601 GGCAAGGAGT ACAAGTGCAA GGTCTCCAAC AAAGCCCTCC CAGCCCCCAT
651 CGAGAAAACC ATCTCCAAAG CCAAAGGGCA GCCCCGAGAA CCACAGGTGT
701 GCACCCTGCC CCCATCCCGG GAGGAGATGA CCAAGAACCA GGTCAGCCTG
751 TCCTGCGCCG TCAAAGGCTT CTATCCCAGC GACATCGCCG TGGAGTGGGA
801 GAGCAATGGG CAGCCGGAGA ACAACTACAA GACCACGCCT CCCGTGCTGG
851 ACTCCGACGG CTCCTTCTTC CTCGTGAGCA AGCTCACCGT GGACAAGAGC
901 AGGTGGCAGC AGGGGAACGT CTTCTCATGC TCCGTGATGC ATGAGGCTCT
951 GCACAACCAC TACACGCAGA AGAGCCTCTC CCTGTCTCCG GGTAAA
(SEQ ID NO: 252)

[0325] Purification of various ALK4-Fc:ActRIIB-Fc complexes could be achieved by a series of column chromatography steps, including, for example, three or more of the following, in any order: protein A chromatography, Q sepharose chromatography, phenylsepharose chromatography, size exclusion chromatography and epitope-based affinity chromatography (e.g., with an antibody or functionally equivalent ligand directed against an epitope on ALK4 or ActRIIB), and multimodal chromatography (e.g., with resin containing both electrostatic and hydrophobic ligands). The purification could be completed with viral filtration and buffer exchange.

[0326] In certain aspects, the present disclosure relates to protein complexes that comprise an ALK7 polypeptide. As used herein, the term “ALK7” refers to a family of activin receptor-like kinase-7 proteins from any species and variants derived from such ALK7 proteins by mutagenesis or other modification. Reference to ALK7 herein is understood to be a reference to any one of the currently identified forms. Members of the ALK7 family are generally transmembrane proteins, composed of a ligand-binding extracellular domain with a cysteine-rich region, a transmembrane domain, and a cytoplasmic domain with predicted serine/threonine kinase activity.

[0327] The term “ALK7 polypeptide” includes polypeptides comprising any naturally occurring polypeptide of an ALK7 family member as well as any variants thereof (including mutants, fragments, fusions, and peptidomimetic forms) that retain a useful activity.

[0328] Four naturally occurring isoforms of human ALK7 have been described. The sequence of human ALK7 isoform 1 precursor protein (NCBI Ref Seq NP_660302.2) is as follows:

1 MTRALCSALR QALLLLAAAA ELSPGLKCVC LLCDSSNFTC QTEGACWASV MLTNGKEQVI
61 KSCVSLPELN AQVFCHSSNN VTKTECCFTD FCNNITLHLP TASPNAPKLG PMELAIIITV
121 PVCLLSIAAM LTVWACQGRQ CSYRKKKRPN VEEPLSECNL VNAGKTLKDL IYDVTASGSG
181 SGLPLLVQRT IARTIVLQEI VGKGRFGEVW HGRWCGEDVA VKIFSSRDER SWFREAEIYQ
241 TVMLRHENIL GFIAADNKDN GTWTQLWLVS EYHEQGSLYD YLNRNIVTVA GMIKLALSIA
301 SGLAHLHMEI VGTQGKPAIA HRDIKSKNIL VKKCETCAIA DLGLAVKHDS ILNTIDIPQN
361 PKVGTKRYMA PEMLDDTMNV NIFESFKRAD IYSVGLVYWE IARRCSVGGI VEEYQLPYYD
421 MVPSDPSIEE MRKVVCDQKF RPSIPNQWQS CEALRVMGRI MRECWYANGA ARLTALRIKK
481 TISQLCVKED CKA (SEQ ID NO: 120)

[0329] The signal peptide is indicated by a single underline and the extracellular domain is indicated in bold font.

[0330] A processed extracellular ALK7 isoform 1 polypeptide sequence is as follows:

ELSPGLKCVCLLCDSSNFTCQTEGACWASVMLTNGKEQVIKSCVSLPELN
AQVFCHSSNNVTKTECCFTDFCNNITLHLPTASPNAPKLGPME
(SEQ ID NO: 123)

[0331] A nucleic acid sequence encoding human ALK7 isoform 1 precursor protein is shown below in SEQ ID NO: 233, corresponding to nucleotides 244-1722 of Genbank Reference Sequence NM_145259.2. A nucleic acid sequence encoding the processed extracellular ALK7 polypeptide (isoform 1) is show in in SEQ ID NO: 234.

[0332] An amino acid sequence of an alternative isoform of human ALK7, isoform 2 (NCBI Ref Seq NP_001104501.1), is shown in its processed form as follows (SEQ ID NO: 124), where the extracellular domain is indicated in bold font.

1 MLTNGKEQVI KSCVSLPELN AQVFCHSSNN VTKTECCFTD FCNNITLHLP TASPNAPKLG
61 PMELAIIITV PVCLLSIAAM LTVWACQGRQ CSYRKKKRPN VEEPLSECNL VNAGKTLKDL
121 IYDVTASGSG SGLPLLVQRT IARTIVLQEI VGKGRFGEVW HGRWCGEDVA VKIFSSRDER
181 SWFREAEIYQ TVMLRHENIL GFIAADNKDN GTWTQLWLVS EYHEQGSLYD YLNRNIVTVA
241 GMIKLALSIA SGLAHLHMEI VGTQGKPAIA HRDIKSKNIL VKKCETCAIA DLGLAVKHDS
301 ILNTIDIPQN PKVGTKRYMA PEMLDDTMNV NIFESFKRAD IYSVGLVYWE IARRCSVGGI
361 VEEYQLPYYD MVPSDPSIEE MRKVVCDQKF RPSIPNQWQS CEALRVMGRI MRECWYANGA
421 ARLTALRIKK TISQLCVKED CKA (SEQ ID NO: 124)

[0333] An amino acid sequence of the extracellular ALK7 polypeptide (isoform 2) is as follows:

MLTNGKEQVIKSCVSLPELNAQVFCHSSNNVTKTECCFTDFCNNITLHLP
TASPNAPKLGPME (SEQ ID NO: 125).

[0334] A nucleic acid sequence encoding the processed ALK7 polypeptide (isoform 2) is shown below in SEQ ID NO: 235, corresponding to nucleotides 279-1607 of NCBI Reference Sequence NM_001111031.1.

[0335] A nucleic acid sequence encoding an extracellular ALK7 polypeptide (isoform 2) is shown in SEQ ID NO: 236.

[0336] An amino acid sequence of an alternative human ALK7 precursor protein, isoform 3 (NCBI Ref Seq NP_001104502.1), is shown as follows (SEQ ID NO: 121), where the signal peptide is indicated by a single underline.

1 MTRALCSALR QALLLLAAAA ELSPGLKCVC LLCDSSNFTC QTEGACWASV MLTNGKEQVI
61 KSCVSLPELN AQVFCHSSNN VTKTECCFTD FCNNITLHLP TGLPLLVQRT IARTIVLQEI
121 VGKGRFGEVW HGRWCGEDVA VKIFSSRDER SWFREAEIYQ TVMLRHENIL GFIAADNKDN
181 GTWTQLWLVS EYHEQGSLYD YLNRNIVTVA GMIKLALSIA SGLAHLHMEI VGTQGKPAIA
241 HRDIKSKNIL VKKCETCAIA DLGLAVKHDS ILNTIDIPQN PKVGTKRYMA PEMLDDTMNV
301 NIFESFKRAD IYSVGLVYWE IARRCSVGGI VEEYQLPYYD MVPSDPSIEE MRKVVCDQKF
361 RPSIPNQWQS CEALRVMGRI MRECWYANGA ARLTALRIKK TISQLCVKED CKA
(SEQ ID NO: 121)

[0337] The amino acid sequence of a processed ALK7 polypeptide (isoform 3) is as follows (SEQ ID NO: 126). This isoform lacks a transmembrane domain and is therefore proposed to be soluble in its entirety (Roberts et al., 2003, Biol Reprod 68:1719-1726). N-terminal variants of SEQ ID NO: 126 are predicted as described below.

1 ELSPGLKCVC LLCDSSNFTC QTEGACWASV MLTNGKEQVI KSCVSLPELN AQVFCHSSNN
61 VTKTECCFTD FCNNITLHLP TGLPLLVQRT IARTIVLQEI VGKGRFGEVW HGRWCGEDVA
121 VKIFSSRDER SWFREAEIYQ TVMLRHENIL GFIAADNKDN GTWTQLWLVS EYHEQGSLYD
181 YLNRNIVTVA GMIKLALSIA SGLAHLHMEI VGTQGKPAIA HRDIKSKNIL VKKCETCAIA
241 DLGLAVKHDS ILNTIDIPQN PKVGTKRYMA PEMLDDTMNV NIFESFKRAD IYSVGLVYWE
301 IARRCSVGGI VEEYQLPYYD MVPSDPSIEE MRKVVCDQKF RPSIPNQWQS CEALRVMGRI
361 MRECWYANGA ARLTALRIKK TISQLCVKED CKA (SEQ ID NO: 126)

[0338] A nucleic acid sequence encoding an unprocessed ALK7 polypeptide precursor protein (isoform 3) is shown in SEQ ID NO: 237, corresponding to nucleotides 244-1482 of NCBI Reference Sequence NM_001111032.1. A nucleic acid sequence encoding a processed ALK7 polypeptide (isoform 3) is shown in SEQ ID NO: 238.

[0339] An amino acid sequence of an alternative human ALK7 precursor protein, isoform 4 (NCBI Ref Seq NP_001104503.1), is shown as follows (SEQ ID NO: 122), where the signal peptide is indicated by a single underline.

1 MTRALCSALR QALLLLAAAA ELSPGLKCVC LLCDSSNFTC QTEGACWASV MLTNGKEQVI
61 KSCVSLPELN AQVFCHSSNN VTKTECCFTD FCNNITLHLP TDNGTWTQLW LVSEYHEQGS
121 LYDYLNRNIV TVAGMIKLAL SIASGLAHLH MEIVGTQGKP AIAHRDIKSK NILVKKCETC
181 AIADLGLAVK HDSILNTIDI PQNPKVGTKR YMAPEMLDDT MNVNIFESFK RADIYSVGLV
241 YWEIARRCSV GGIVEEYQLP YYDMVPSDPS IEEMRKWCD QKFRPSIPNQ WQSCEALRVM
301 GRIMRECWYA NGAARLTALR IKKTISQLCV KEDCKA (SEQ ID NO: 122)

[0340] An amino acid sequence of a processed ALK7 polypeptide (isoform 4) is as follows (SEQ ID NO: 127). Like ALK7 isoform 3, isoform 4 lacks a transmembrane domain and is therefore proposed to be soluble in its entirety (Roberts et al., 2003, Biol Reprod 68:1719-1726). N-terminal variants of SEQ ID NO: 127 are predicted as described below.

1 ELSPGLKCVC LLCDSSNFTC QTEGACWASV MLTNGKEQVI KSCVSLPELN AQVFCHSSNN
61 VTKTECCFTD FCNNITLHLP TDNGTWTQLW LVSEYHEQGS LYDYLNRNIV TVAGMIKLAL
121 SIASGLAHLH MEIVGTQGKP AIAHRDIKSK NILVKKCETC AIADLGLAVK HDSILNTIDI
181 PQNPKVGTKR YMAPEMLDDT MNVNIFESFK RADIYSVGLV YWEIARRCSV GGIVEEYQLP
240 YYDMVPSDPS IEEMRKWCD QKFRPSIPNQ WQSCEALRVM GRIMRECWYA NGAARLTALR
301 IKKTISQLCV KEDCKA (SEQ ID NO: 127)

[0341] A nucleic acid sequence encoding the unprocessed ALK7 polypeptide precursor protein (isoform 4) is shown in SEQ ID NO: 239, corresponding to nucleotides 244-1244 of NCBI Reference Sequence NM_001111033.1. A nucleic acid sequence encoding the processed ALK7 polypeptide (isoform 4) is shown in SEQ ID NO: 240.

[0342] Based on the signal sequence of full-length ALK7 (isoform 1) in the rat (see NCBI Reference Sequence NP_620790.1) and on the high degree of sequence identity between human and rat ALK7, it is predicted that a processed form of human ALK7 isoform 1 is as follows (SEQ ID NO: 128).

1 LKCVCLLCDS SNFTCQTEGA CWASVMLTNG KEQVIKSCVS LPELNAQVFC HSSNNVTKTE
61 CCFTDFCNNI TLHLPTASPN APKLGPME (SEQ ID NO: 128)

[0343] Active variants of processed ALK7 isoform 1 are predicted in which SEQ ID NO: 123 is truncated by 1, 2, 3, 4, 5, 6, or 7 amino acids at the N-terminus and SEQ ID NO: 128 is truncated by 1 or 2 amino acids at the N-terminus. Consistent with SEQ ID NO: 128, it is further expected that leucine is the N-terminal amino acid in the processed forms of human ALK7 isoform 3 (SEQ ID NO: 126) and human ALK7 isoform 4 (SEQ ID NO: 127).

[0344] In certain embodiments, the disclosure relates to heteromultimers that comprise at least one ALK7 polypeptide, which includes fragments, functional variants, and modified forms thereof. Preferably, ALK7 polypeptides for use as disclosed herein (e.g., heteromultimers comprising an ALK7 polypeptide and uses thereof) are soluble (e.g., an extracellular domain of ALK7). In other preferred embodiments, ALK7 polypeptides for use as disclosed herein bind to and/or inhibit (antagonize) activity (e.g., induction of Smad signaling) of one or more TGF-beta superfamily ligands. In some embodiments, heteromultimers of the disclosure comprise at least one ALK7 polypeptide that is at least 70%, 75%, 80%, 85%, 90%, 91%, 92%, 93%, 94%, 95%, 96%, 97%, 98%, 99%, or 100% identical to the amino acid sequence of SEQ ID NO: 120, 121, 122, 123, 124, 125, 126, 127, 128, 129, 130, 133, or 134. In some embodiments, heteromultimers of the disclosure consist or consist essentially of at least one ALK7 polypeptide that is at least 70%, 75%, 80%, 85%, 90%, 91%, 92%, 93%, 94%, 95%, 96%, 97%, 98%, 99%, or 100% identical to the amino acid sequence of SEQ ID NO: 120, 121, 122, 123, 124, 125, 126, 127, 128, 129, 130, 133, or 134.

[0345] In certain aspects, the disclosure relates to a heteromultimer that comprises an ALK7-Fc fusion protein. In some embodiments, the ALK7-Fc fusion protein comprises an ALK7 domain comprising an amino acid sequence that is at least 70%, 75%, 80%, 85%, 86%, 87%, 88%, 89%, 90%, 91%, 92%, 93%, 94%, 95%, 96%, 97%, 98%, 99%, or 100% identical to an amino acid sequence that begins at any one of amino acids 21-28 (e.g., amino acid residues 21, 22, 23, 24, 25, 26, 27, and 28) SEQ ID NO: 120, 121, or 122, and ends at any one of amino acids 92-113 (e.g., amino acid residues 92, 93, 94, 95, 96, 97, 98, 99, 100, 101, 102, 103, 104, 105, 106, 107, 108, 109, 110, 111, 112, and 113) of SEQ ID NO: 120, 121, or 122. In some embodiments, the ALK7-Fc fusion protein comprises an ALK7 domain comprising an amino acid sequence that is at least 70%, 75%, 80%, 85%, 86%, 87%, 88%, 89%, 90%, 91%, 92%, 93%, 94%, 95%, 96%, 97%, 98%, 99%, or 100% identical to amino acids 28-92 of SEQ ID NOs: 120, 121, or 122. In some embodiments, the ALK7-Fc fusion protein comprises an ALK7 domain comprising an amino acid sequence that is at least 70%, 75%, 80%, 85%, 86%, 87%, 88%, 89%, 90%, 91%, 92%, 93%, 94%, 95%, 96%, 97%, 98%, 99%, or 100% identical to amino acids 21-113 of SEQ ID NOs: 120, 121, or 122. In some embodiments, the ALK7-Fc fusion protein comprises an ALK7 domain comprising an amino acid sequence that is at least 70%, 75%, 80%, 85%, 86%, 87%, 88%, 89%, 90%, 91%, 92%, 93%, 94%, 95%, 96%, 97%, 98%, 99%, or 100% identical to the amino acid sequence of any one of SEQ ID Nos: 120, 123, 124, 125, 121, 126, 122, 127, 128, 129, 130, 131, 132, 133, 134, 135, and 136.

[0346] In some embodiments, the ALK7-Fc fusion protein employs the TPA leader and is as follows (SEQ ID NO: 129):

1 MDAMKRGLCC VLLLCGAVFV SPGAGLKCVC LLCDSSNFTC QTEGACWASV
51 MLTNGKEQVI KSCVSLPELN AQVFCHSSNN VTKTECCFTD FCNNITLHLP
101 TASPNAPKLG PMETGGGTHT CPPCPAPELL GGPSVFLFPP KPKDTLMISR
151 TPEVTCVVVD VSHEDPEVKF NWYVDGVEVH NAKTKPREEQ YNSTYRVVSV
201 LTVLHQDWLN GKEYKCKVSN KALPAPIEKT ISKAKGQPRE PQVYTLPPSR
251 EEMTKNQVSL TCLVKGFYPS DIAVEWESNG QPENNYDTTP PVLDSDGSFF
301 LYSDLTVDKS RWQQGNVFSC SVMHEALHNH YTQKSLSLSP G
(SEQ ID NO: 129)

[0347] The signal sequence and linker sequence are underlined. To promote formation of the ActRIIB-Fc:ALK7-Fc heterodimer rather than either of the possible homodimeric complexes, two amino acid substitutions (replacing lysines with aspartic acids) can be introduced into the Fc domain of the fusion protein as indicated by double underline above. The amino acid sequence of SEQ ID NO: 129 may optionally be provided with a lysine added at the C-terminus.

[0348] This ALK7-Fc fusion protein is encoded by the following nucleic acid (SEQ ID NO: 255):

1 ATGGATGCAA TGAAGAGAGG GCTCTGCTGT GTGCTGCTGC TGTGTGGAGC
51 AGTCTTCGTT TCGCCCGGCG CCGGACTGAA GTGTGTATGT CTTTTGTGTG
101 ATTCTTCAAA CTTTACCTGC CAAACAGAAG GAGCATGTTG GGCATCAGTC
151 ATGCTAACCA ATGGAAAAGA GCAGGTGATC AAATCCTGTG TCTCCCTTCC
201 AGAACTGAAT GCTCAAGTCT TCTGTCATAG TTCCAACAAT GTTACCAAAA
251 CCGAATGCTG CTTCACAGAT TTTTGCAACA ACATAACACT GCACCTTCCA
301 ACAGCATCAC CAAATGCCCC AAAACTTGGA CCCATGGAGA CCGGTGGTGG
351 AACTCACACA TGCCCACCGT GCCCAGCACC TGAACTCCTG GGGGGACCGT
401 CAGTCTTCCT CTTCCCCCCA AAACCCAAGG ACACCCTCAT GATCTCCCGG
451 ACCCCTGAGG TCACATGCGT GGTGGTGGAC GTGAGCCACG AAGACCCTGA
501 GGTCAAGTTC AACTGGTACG TGGACGGCGT GGAGGTGCAT AATGCCAAGA
551 CAAAGCCGCG GGAGGAGCAG TACAACAGCA CGTACCGTGT GGTCAGCGTC
601 CTCACCGTCC TGCACCAGGA CTGGCTGAAT GGCAAGGAGT ACAAGTGCAA
651 GGTCTCCAAC AAAGCCCTCC CAGCCCCCAT CGAGAAAACC ATCTCCAAAG
701 CCAAAGGGCA GCCCCGAGAA CCACAGGTGT ACACCCTGCC CCCATCCCGG
751 GAGGAGATGA CCAAGAACCA GGTCAGCCTG ACCTGCCTGG TCAAAGGCTT
801 CTATCCCAGC GACATCGCCG TGGAGTGGGA GAGCAATGGG CAGCCGGAGA
851 ACAACTACGA CACCACGCCT CCCGTGCTGG ACTCCGACGG CTCCTTCTTC
901 CTCTATAGCG ACCTCACCGT GGACAAGAGC AGGTGGCAGC AGGGGAACGT
951 CTTCTCATGC TCCGTGATGC ATGAGGCTCT GCACAACCAC TACACGCAGA
1001 AGAGCCTCTC CCTGTCTCCG GGT (SEQ ID NO: 255)

[0349] The mature ALK7-Fc fusion protein sequence (SEQ ID NO: 130) is expected to be as follows and may optionally be provided with a lysine added at the C-terminus.

1 GLKCVCLLCD SSNFTCQTEG ACWASVMLTN GKEQVIKSCV SLPELNAQVF
51 CHSSNNVTKT ECCFTDFCNN ITLHLPTASP NAPKLGPMET GGGTHTCPPC
101 PAPELLGGPS VFLFPPKPKD TLMISRTPEV TCVVVDVSHE DPEVKFNWYV
151 DGVEVHNAKT KPREEQYNST YRVVSVLTVL HQDWLNGKEY KCKVSNKALP
201 APIEKTISKA KGQPREPQVY TLPPSREEMT KNQVSLTCLV KGFYPSDIAV
251 EWESNGQPEN NYDTTPPVLD SDGSFFLYSD LTVDKSRWQQ GNVFSCSVMH
301 EALHNHYTQK SLSLSPG (SEQ ID NO: 130)

[0350] The complementary form of ALK7-Fc fusion polypeptide (SEQ ID NO: 133) is as follows:

1 MDAMKRGLCC VLLLCGAVFV SPGAGLKCVC LLCDSSNFTC QTEGACWASV
51 MLTNGKEQVI KSCVSLPELN AQVFCHSSNN VTKTECCFTD FCNNITLHLP
101 TASPNAPKLG PMETGGGTHT CPPCPAPELL GGPSVFLFPP KPKDTLMISR
151 TPEVTCVVVD VSHEDPEVKF NWYVDGVEVH NAKTKPREEQ YNSTYRVVSV
201 LTVLHQDWLN GKEYKCKVSN KALPAPIEKT ISKAKGQPRE PQVCTLPPSR
251 EEMTKNQVSL SCAVKGFYPS DIAVEWESNG QPENNYKTTP PVLDSDGSFF
301 LVSKLTVDKS RWQQGNVFSC SVMHEALHNH YTQKSLSLSP GK
(SEQ ID NO: 133)

[0351] The leader sequence and linker sequence are underlined. To guide heterodimer formation with certain Fc fusion polypeptides disclosed herein, four amino acid substitutions can be introduced into the Fc domain of the ALK7 fusion polypeptide as indicated by double underline above. Furthermore, the C-terminal lysine residue of the Fc domain can be deleted. The amino acid sequence of SEQ ID NO: 133 may optionally be provided with the lysine removed from the C-terminus.

[0352] The mature ALK7-Fc fusion protein sequence (SEQ ID NO: 134) is expected to be as follows and may optionally be provided with the lysine removed from the C-terminus.

1 GLKCVCLLCD SSNFTCQTEG ACWASVMLTN GKEQVIKSCV SLPELNAQVF
51 CHSSNNVTKT ECCFTDFCNN ITLHLPTASP NAPKLGPMET GGGTHTCPPC
101 PAPELLGGPS VFLFPPKPKD TLMISRTPEV TCVVVDVSHE DPEVKFNWYV
151 DGVEVHNAKT KPREEQYNST YRVVSVLTVL HQDWLNGKEY KCKVSNKALP
201 APIEKTISKA KGQPREPQVC TLPPSREEMT KNQVSLSCAV KGFYPSDIAV
251 EWESNGQPEN NYKTTPPVLD SDGSFFLVSK LTVDKSRWQQ GNVFSCSVMH
301 EALHNHYTQK SLSLSPGK (SEQ ID NO: 134)

[0353] In certain embodiments, the disclosure provides for a heteromultimer protein comprising any of the variant ActRIIB polypeptides disclosed herein and a second polypeptide selected from the group consisting of: an ALK4 or ALK7 polypeptide, or functional fragments thereof. In some embodiments, the heteromultimer protein complex comprises a variant ActRIIB polypeptide and an ALK4 polypeptide, or a functional fragment thereof. In some embodiments, the heteromultimer protein complex comprises a variant ActRIIB polypeptide and an ALK7 polypeptide, or a functional fragment thereof. In some embodiments, the second polypeptide is an ALK4 polypeptide or a functional fragment thereof. In some embodiments, the ALK4 polypeptide or functional fragment thereof comprises an amino acid sequence that is at least 70%, 75%, 80%, 85%, 90%, 95%, 96%, 97%, 98%, 99%, or 100% identical to the amino acid sequence of SEQ ID NO: 84 or 85, or functional fragments thereof. In some embodiments, the ALK4 polypeptide or functional fragment thereof comprises an amino acid sequence that is at least 70%, 75%, 80%, 85%, 90%, 95%, 96%, 97%, 98%, 99%, or 100% identical to the amino acid sequence of SEQ ID NO: 84, 85, 86, 87, 88, 89, 92, and 93, or functional fragments thereof. In some embodiments, the second polypeptide is an ALK7 polypeptide or a functional fragment thereof. In some embodiments, the ALK7 polypeptide or functional fragment thereof comprises an amino acid sequence that is at least 70%, 75%, 80%, 85%, 90%, 95%, 96%, 97%, 98%, 99%, or 100% identical to the amino acid sequence of SEQ ID NO: 120, 121, or 122, or functional fragments thereof. In some embodiments, the ALK7 polypeptide or functional fragment thereof comprises an amino acid sequence that is at least 70%, 75%, 80%, 85%, 90%, 95%, 96%, 97%, 98%, 99%, or 100% identical to the amino acid sequence of SEQ ID NO: 120, 121, 122, 123, 124, 125, 126, 127, 128, 129, 130, 133, and 134, or functional fragments thereof.

[0354] In some embodiments, the present disclosure contemplates making functional variants by modifying the structure of an ALK4 polypeptide, ALK7 polypeptide, and/or a variant ActRIIB polypeptide for such purposes as enhancing therapeutic efficacy or stability (e.g., shelf-life and resistance to proteolytic degradation in vivo). Variants can be produced by amino acid substitution, deletion, addition, or combinations thereof. For instance, it is reasonable to expect that an isolated replacement of a leucine with an isoleucine or valine, an aspartate with a glutamate, a threonine with a serine, or a similar replacement of an amino acid with a structurally related amino acid (e.g., conservative mutations) will not have a major effect on the biological activity of the resulting molecule. Conservative replacements are those that take place within a family of amino acids that are related in their side chains. Whether a change in the amino acid sequence of a polypeptide of the disclosure results in a functional homolog can be readily determined by assessing the ability of the variant polypeptide to produce a response in cells in a fashion similar to the wild-type polypeptide, or to bind to one or more TGF-beta superfamily ligands including, for example, activin A, activin B, GDF8, GDF11 and BMP10.

[0355] In some embodiments, the present disclosure contemplates making functional variants by modifying the structure of an ALK4 polypeptide, ALK7 polypeptide, and/or a variant ActRIIB polypeptide for such purposes as enhancing therapeutic efficacy or stability (e.g., increased shelf-life and/or increased resistance to proteolytic degradation).

[0356] In certain embodiments, the present disclosure contemplates specific mutations of an ALK4 polypeptide, ALK7 polypeptide, and/or a variant ActRIIB polypeptide of the disclosure so as to alter the glycosylation of the polypeptide. Such mutations may be selected so as to introduce or eliminate one or more glycosylation sites, such as O-linked or N-linked glycosylation sites. Asparagine-linked glycosylation recognition sites generally comprise a tripeptide sequence, asparagine-X-threonine, or asparagine-X-serine (where “X” is any amino acid) which is specifically recognized by appropriate cellular glycosylation enzymes. The alteration may also be made by the addition of, or substitution by, one or more serine or threonine residues to the sequence of the polypeptide (for O-linked glycosylation sites). A variety of amino acid substitutions or deletions at one or both of the first or third amino acid positions of a glycosylation recognition site (and/or amino acid deletion at the second position) results in non-glycosylation at the modified tripeptide sequence. Another means of increasing the number of carbohydrate moieties on a polypeptide is by chemical or enzymatic coupling of glycosides to the polypeptide. Depending on the coupling mode used, the sugar(s) may be attached to (a) arginine and histidine; (b) free carboxyl groups; (c) free sulfhydryl groups such as those of cysteine; (d) free hydroxyl groups such as those of serine, threonine, or hydroxyproline; (e) aromatic residues such as those of phenylalanine, tyrosine, or tryptophan; or (f) the amide group of glutamine. Removal of one or more carbohydrate moieties present on a polypeptide may be accomplished chemically and/or enzymatically. Chemical deglycosylation may involve, for example, exposure of a polypeptide to the compound trifluoromethanesulfonic acid, or an equivalent compound. This treatment results in the cleavage of most or all sugars except the linking sugar (N-acetylglucosamine or N-acetylgalactosamine), while leaving the amino acid sequence intact. Enzymatic cleavage of carbohydrate moieties on polypeptides can be achieved by the use of a variety of endo- and exo-glycosidases as described by Thotakura et al. [Meth. Enzymol. (1987) 138:350]. The sequence of a polypeptide may be adjusted, as appropriate, depending on the type of expression system used, as mammalian, yeast, insect, and plant cells may all introduce differing glycosylation patterns that can be affected by the amino acid sequence of the peptide. In general, ALK4 polypeptide, ALK7 polypeptide, and/or a variant ActRIIB polypeptide complexes of the present disclosure for use in humans may be expressed in a mammalian cell line that provides proper glycosylation, such as HEK293 or CHO cell lines, although other mammalian expression cell lines are expected to be useful as well.

[0357] The present disclosure further contemplates a method of generating mutants, particularly sets of combinatorial mutants of an ALK4 polypeptide, ALK7 polypeptide, and/or a variant ActRIIB polypeptide of the disclosure, as well as truncation mutants. Pools of combinatorial mutants are especially useful for identifying functionally active (e.g., ligand binding) ALK4, ALK7, and/or a variant ActRIIB polypeptide sequences. The purpose of screening such combinatorial libraries may be to generate, for example, polypeptides variants which have altered properties, such as altered pharmacokinetic or altered ligand binding. A variety of screening assays are provided below, and such assays may be used to evaluate variants. For example, variant ALK4, ALK7, and/or a variant ActRIIB polypeptide sequences may be screened for ability to bind to a TGF-beta superfamily ligand (e.g., activin A, activin B, GDF8, GDF11, and BMP10), to prevent binding of a TGF-beta superfamily ligand to a TGF-beta superfamily receptor, and/or to interfere with signaling caused by an TGF-beta superfamily ligand.

[0358] The activity of ALK4, ALK7, and/or a variant ActRIIB polypeptide heteromultimer of the disclosure also may be tested, for example in a cell-based or in vivo assay. For example, the effect of a heteromultimer complex on the expression of genes or the activity of proteins involved in muscle production in a muscle cell may be assessed. This may, as needed, be performed in the presence of one or more recombinant TGF-beta superfamily ligand proteins (e.g., activin A, activin B, GDF8, GDF11, and BMP10), and cells may be transfected so as to produce an ALK4, ALK7, and/or variant ActRIIB polypeptide complex, and optionally, a TGF-beta superfamily ligand. Likewise, a heteromultimer complex of the disclosure may be administered to a mouse or other animal, and one or more measurements, such as muscle formation and strength may be assessed using art-recognized methods. Similarly, the activity of a heteromultimer, or variants thereof, may be tested in osteoblasts, adipocytes, and/or neuronal cells for any effect on growth of these cells, for example, by the assays as described herein and those of common knowledge in the art. A SMAD-responsive reporter gene may be used in such cell lines to monitor effects on downstream signaling.

[0359] In certain aspects, heteromultimers of the disclosure bind to one or more TGF-beta superfamily ligands. In some embodiments, heteromultimers of the disclosure bind to one or more TGF-beta superfamily ligands with a K_{D} of at least 1 × 10⁻⁷ M. In some embodiments, the one or more TGF-beta superfamily ligands is selected from the group consisting of: activin A, activin B, GDF8, GDF11, and BMP10.

[0360] In certain aspects, heteromultimers of the disclosure inhibits one or more TGF-beta super family ligands. In some embodiments, heteromultimers of the disclosure inhibits signaling of one or more TGF-beta super family ligands. In some embodiments, heteromultimers of the disclosure inhibits Smad signaling of one or more TGF-beta super family ligands. In some embodiments, heteromultimers of the disclosure inhibits signaling of one or more TGF-beta super family ligands in a cell-based assay. In some embodiments, heteromultimers of the disclosure inhibits one or more TGF-beta super family ligands selected from the group consisting of: activin A, activin B, GDF8, GDF11, and BMP10.

[0361] Combinatorial-derived variants can be generated which have increased selectivity or generally increased potency relative to a reference ALK4, ALK7, and/or variant ActRIIB polypeptide heteromultimer. Such variants, when expressed from recombinant DNA constructs, can be used in gene therapy protocols. Likewise, mutagenesis can give rise to variants which have intracellular half-lives dramatically different than the corresponding unmodified ALK4, ALK7, and/or variant ActRIIB polypeptide heteromultimer. For example, the altered protein can be rendered either more stable or less stable to proteolytic degradation or other cellular processes which result in destruction, or otherwise inactivation, of an unmodified polypeptide. Such variants, and the genes which encode them, can be utilized to alter polypeptide complex levels by modulating the half-life of the polypeptide. For instance, a short half-life can give rise to more transient biological effects and, when part of an inducible expression system, can allow tighter control of recombinant polypeptide complex levels within the cell. In an Fc fusion protein, mutations may be made in the linker (if any) and/or the Fc portion to alter one or more activities of the ALK4, ALK7, and/or variant ActRIIB polypeptide heteromultimer complex including, for example, immunogenicity, half-life, and solubility.

[0362] Many methods known in the art can be used to generate heteromultimers of the disclosure. For example, non-naturally occurring disulfide bonds may be constructed by replacing on a first polypeptide (e.g., a variant ActRIIB polypeptide) a naturally occurring amino acid with a free thiol-containing residue, such as cysteine, such that the free thiol interacts with another free thiol-containing residue on a second polypeptide (e.g., an ALK4 polypeptide or an ALK7 polypeptide) such that a disulfide bond is formed between the first and second polypeptides. Additional examples of interactions to promote heteromultimer formation include, but are not limited to, ionic interactions such as described in Kjaergaard et al., WO2007147901; electrostatic steering effects such as described in Kannan et al., U.S.8,592,562; coiled-coil interactions such as described in Christensen et al., U.S.20120302737; leucine zippers such as described in Pack & Plueckthun,(1992) Biochemistry 31: 1579-1584; and helix-turn-helix motifs such as described in Pack et al., (1993) Bio/Technology 11: 1271-1277. Linkage of the various segments may be obtained via, e.g., covalent binding such as by chemical cross-linking, peptide linkers, disulfide bridges, etc., or affinity interactions such as by avidin-biotin or leucine zipper technology.

[0363] In certain aspects, a multimerization domain may comprise one component of an interaction pair. In some embodiments, the polypeptides disclosed herein may form protein complexes comprising a first polypeptide covalently or non-covalently associated with a second polypeptide, wherein the first polypeptide comprises the amino acid sequence of a variant ActRIIB polypeptide and the amino acid sequence of a first member of an interaction pair; and the second polypeptide comprises the amino acid sequence of an ALK4 polypeptide or an ALK7 polypeptide, and the amino acid sequence of a second member of an interaction pair. The interaction pair may be any two polypeptide sequences that interact to form a complex, particularly a heterodimeric complex although operative embodiments may also employ an interaction pair that can form a homodimeric complex. An interaction pair may be selected to confer an improved property/activity such as increased serum half-life, or to act as an adaptor on to which another moiety is attached to provide an improved property/activity. For example, a polyethylene glycol moiety may be attached to one or both components of an interaction pair to provide an improved property/activity such as improved serum half-life.

[0364] The first and second members of the interaction pair may be an asymmetric pair, meaning that the members of the pair preferentially associate with each other rather than self-associate. Accordingly, first and second members of an asymmetric interaction pair may associate to form a heterodimeric complex (see, e.g., FIG. 1B). Alternatively, the interaction pair may be unguided, meaning that the members of the pair may associate with each other or self-associate without substantial preference and thus may have the same or different amino acid sequences (see, e.g., FIG. 1A). Accordingly, first and second members of an unguided interaction pair may associate to form a homodimer complex or a heterodimeric complex. Optionally, the first member of the interaction pair (e.g., an asymmetric pair or an unguided interaction pair) associates covalently with the second member of the interaction pair. Optionally, the first member of the interaction pair (e.g., an asymmetric pair or an unguided interaction pair) associates non-covalently with the second member of the interaction pair.

[0365] As specific examples, the present disclosure provides fusion proteins comprising a variant ActRIIB polypeptide or an unmodified ActRIIB polypeptide fused to a polypeptide comprising a constant domain of an immunoglobulin, such as a CH1, CH2, or CH3 domain of an immunoglobulin or an Fc domain. Fc domains derived from human IgG1, IgG2, IgG3, and IgG4 are provided herein. Other mutations are known that decrease either CDC or ADCC activity, and collectively, any of these variants are included in the disclosure and may be used as advantageous components of a heteromultimers of the disclosure. Optionally, the IgG1 Fc domain of SEQ ID NO: 13 has one or more mutations at residues such as Asp-265, Lys-322, and Asn-434 (numbered in accordance with the corresponding full-length IgG1). In certain cases, the variant Fc domain having one or more of these mutations (e.g., Asp-265 mutation) has reduced ability of binding to the Fcy receptor relative to a wildtype Fc domain. In other cases, the variant Fc domain having one or more of these mutations (e.g., Asn-434 mutation) has increased ability of binding to the MHC class I-related Fc-receptor (FcRN) relative to a wild-type Fc domain.

[0366] An example of a native amino acid sequence that may be used for the Fc portion of human IgG1 (G1Fc) is shown below (SEQ ID NO: 13). Dotted underline indicates the hinge region, and solid underline indicates positions with naturally occurring variants. In part, the disclosure provides polypeptides comprising, consisting of, or consisting essentially of an amino acid sequence with 70%, 80%, 85%, 86%, 87%, 88%, 89%, 90%, 91%, 92%, 93%, 94%, 95%, 96%, 97%, 98%, 99%, or 100% identity to SEQ ID NO: 13. In some embodiments, the disclosure relates to ActRIIB:ALK4 heteromultimer proteins comprising a variant ActRIIB-Fc fusion protein and an ALK4-Fc fusion protein wherein the variant ActRIIB-Fc fusion protein comprises an Fc domain that is at least 75%, 80%, 85%, 90%, 91%, 92%, 93%, 94%, 95%, 96%, 97%, 98%, 99%, or 100% identical to the amino acid sequence of SEQ ID NO: 13, and the ALK4-Fc fusion protein comprises an Fc domain that is at least 75%, 80%, 85%, 90%, 91%, 92%, 93%, 94%, 95%, 96%, 97%, 98%, 99%, or 100% identical to the amino acid sequence of SEQ ID NO: 13. In some embodiments, the disclosure relates to ActRIIB:ALK7 heteromultimer proteins comprising a variant ActRIIB-Fc fusion protein and an ALK7-Fc fusion protein wherein the variant ActRIIB-Fc fusion protein comprises an Fc domain that is at least 75%, 80%, 85%, 90%, 91%, 92%, 93%, 94%, 95%, 96%, 97%, 98%, 99%, or 100% identical to the amino acid sequence of SEQ ID NO: 13, and the ALK7-Fc fusion protein comprises an Fc domain that is at least 75%, 80%, 85%, 90%, 91%, 92%, 93%, 94%, 95%, 96%, 97%, 98%, 99%, or 100% identical to the amino acid sequence of SEQ ID NO: 13. Naturally occurring variants in G1Fc would include E134D and M136L according to the numbering system used in SEQ ID NO: 13 (see Uniprot P01857).

1 THTCPPCPAP ELLGGPSVFL FPPKPKDTLM ISRTPEVTCV VVDVSHEDPE
51 VKFNWYVDGV EVHNAKTKPR EEQYNSTYRV VSVLTVLHQD WLNGKEYKCK
101 VSNKALPAPI EKTISKAKGQ PREPQVYTLP PSREEMTKNQ VSLTCLVKGF
151 YPSDIAVEWE SNGQPENNYK TTPPVLDSDG SFFLYSKLTV DKSRWQQGNV
201 FSCSVMHEAL HNHYTQKSLS LSPGK (SEQ ID NO: 13)

[0367] An example of a native amino acid sequence that may be used for the Fc portion of human IgG2 (G2Fc) is shown below (SEQ ID NO: 14). Dotted underline indicates the hinge region and double underline indicates positions where there are data base conflicts in the sequence (according to UniProt P01859). In part, the disclosure provides polypeptides comprising, consisting of, or consisting essentially of an amino acid sequence with 70%, 80%, 85%, 86%, 87%, 88%, 89%, 90%, 91%, 92%, 93%, 94%, 95%, 96%, 97%, 98%, 99%, or 100% identity to SEQ ID NO: 14. In some embodiments, the disclosure relates to ActRIIB:ALK4 heteromultimer proteins comprising a variant ActRIIB-Fc fusion protein and an ALK4-Fc fusion protein wherein the variant ActRIIB-Fc fusion protein comprises an Fc domain that is at least 75%, 80%, 85%, 90%, 91%, 92%, 93%, 94%, 95%, 96%, 97%, 98%, 99%, or 100% identical to the amino acid sequence of SEQ ID NO: 14, and the ALK4-Fc fusion protein comprises an Fc domain that is at least 75%, 80%, 85%, 90%, 91%, 92%, 93%, 94%, 95%, 96%, 97%, 98%, 99%, or 100% identical to the amino acid sequence of SEQ ID NO: 14. In some embodiments, the disclosure relates to ActRIIB:ALK7 heteromultimer proteins comprising a variant ActRIIB-Fc fusion protein and an ALK7-Fc fusion protein wherein the variant ActRIIB-Fc fusion protein comprises an Fc domain that is at least 75%, 80%, 85%, 90%, 91%, 92%, 93%, 94%, 95%, 96%, 97%, 98%, 99%, or 100% identical to the amino acid sequence of SEQ ID NO: 14, and the ALK7-Fc fusion protein comprises an Fc domain that is at least 75%, 80%, 85%, 90%, 91%, 92%, 93%, 94%, 95%, 96%, 97%, 98%, 99%, or 100% identical to the amino acid sequence of SEQ ID NO: 14.

1 VECPPCPAPP VAGPSVFLFP PKPKDTLMIS RTPEVTCVVV DVSHEDPEVQ
51 FNWYVDGVEV HNAKTKPREE QFNSTFRVVS VLTVVHQDWL NGKEYKCKVS
101 NKGLPAPIEK TISKTKGQPR EPQVYTLPPS REEMTKNQVS LTCLVKGFYP
151 SDIAVEWESN GQPENNYKTT PPMLDSDGSF FLYSKLTVDK SRWQQGNVFS
201 CSVMHEALHN HYTQKSLSLS PGK (SEQ ID NO: 14)

[0368] Two examples of amino acid sequences that may be used for the Fc portion of human IgG3 (G3Fc) are shown below. The hinge region in G3Fc can be up to four times as long as in other Fc chains and contains three identical 15-residue segments preceded by a similar 17-residue segment. The first G3Fc sequence shown below (SEQ ID NO: 15) contains a short hinge region consisting of a single 15-residue segment, whereas the second G3Fc sequence (SEQ ID NO: 16) contains a full-length hinge region. In each case, dotted underline indicates the hinge region, and solid underline indicates positions with naturally occurring variants according to UniProt P01859. In part, the disclosure provides polypeptides comprising, consisting of, or consisting essentially of an amino acid sequence with 70%, 80%, 85%, 86%, 87%, 88%, 89%, 90%, 91%, 92%, 93%, 94%, 95%, 96%, 97%, 98%, 99%, or 100% identity to SEQ ID NOs: 15 and 16. In some embodiments, the disclosure relates to ActRIIB:ALK4 heteromultimer proteins comprising a variant ActRIIB-Fc fusion protein and an ALK4-Fc fusion protein wherein the variant ActRIIB-Fc fusion protein comprises an Fc domain that is at least 75%, 80%, 85%, 90%, 91%, 92%, 93%, 94%, 95%, 96%, 97%, 98%, 99%, or 100% identical to the amino acid sequence of SEQ ID NO: 15, and the ALK4-Fc fusion protein comprises an Fc domain that is at least 75%, 80%, 85%, 90%, 91%, 92%, 93%, 94%, 95%, 96%, 97%, 98%, 99%, or 100% identical to the amino acid sequence of SEQ ID NO: 15. In some embodiments, the disclosure relates to ActRIIB:ALK7 heteromultimer proteins comprising a variant ActRIIB-Fc fusion protein and an ALK7-Fc fusion protein wherein the variant ActRIIB-Fc fusion protein comprises an Fc domain that is at least 75%, 80%, 85%, 90%, 91%, 92%, 93%, 94%, 95%, 96%, 97%, 98%, 99%, or 100% identical to the amino acid sequence of SEQ ID NO: 15, and the ALK7-Fc fusion protein comprises an Fc domain that is at least 75%, 80%, 85%, 90%, 91%, 92%, 93%, 94%, 95%, 96%, 97%, 98%, 99%, or 100% identical to the amino acid sequence of SEQ ID NO: 15. In some embodiments, the disclosure relates to ActRIIB:ALK4 heteromultimer proteins comprising a variant ActRIIB-Fc fusion protein and an ALK4-Fc fusion protein wherein the variant ActRIIB-Fc fusion protein comprises an Fc domain that is at least 75%, 80%, 85%, 90%, 91%, 92%, 93%, 94%, 95%, 96%, 97%, 98%, 99%, or 100% identical to the amino acid sequence of SEQ ID NO: 16, and the ALK4-Fc fusion protein comprises an Fc domain that is at least 75%, 80%, 85%, 90%, 91%, 92%, 93%, 94%, 95%, 96%, 97%, 98%, 99%, or 100% identical to the amino acid sequence of SEQ ID NO: 16. In some embodiments, the disclosure relates to ActRIIB:ALK7 heteromultimer proteins comprising a variant ActRIIB-Fc fusion protein and an ALK7-Fc fusion protein wherein the variant ActRIIB-Fc fusion protein comprises an Fc domain that is at least 75%, 80%, 85%, 90%, 91%, 92%, 93%, 94%, 95%, 96%, 97%, 98%, 99%, or 100% identical to the amino acid sequence of SEQ ID NO: 16, and the ALK7-Fc fusion protein comprises an Fc domain that is at least 75%, 80%, 85%, 90%, 91%, 92%, 93%, 94%, 95%, 96%, 97%, 98%, 99%, or 100% identical to the amino acid sequence of SEQ ID NO: 16.

1 EPKSCDTPPP CPRCPAPELL GGPSVFLFPP KPKDTLMISR TPEVTCVVVD
51 VSHEDPEVQF KWYVDGVEVH NAKTKPREEQ YNSTFRVVSV LTVLHQDWLN
101 GKEYKCKVSN KALPAPIEKT ISKTKGQPRE PQVYTLPPSR EEMTKNQVSL
151 TCLVKGFYPS DIAVEWESSG QPENNYNTTP PMLDSDGSFF LYSKLTVDKS
201 RWQQGNIFSC SVMHEALHNR FTQKSLSLSP GK (SEQ ID NO: 15)

1 ELKTPLGDTT HTCPRCPEPK SCDTPPPCPR CPEPKSCDTP PPCPRCPEPK
51 SCDTPPPCPR CPAPELLGGP SVFLFPPKPK DTLMISRTPE VTCVVVDVSH
101 EDPEVQFKWY VDGVEVHNAK TKPREEQYNS TFRVVSVLTV LHQDWLNGKE
151 YKCKVSNKAL PAPIEKTISK TKGQPREPQV YTLPPSREEM TKNQVSLTCL
201 VKGFYPSDIA VEWESSGQPE NNYNTTPPML DSDGSFFLYS KLTVDKSRWQ
251 QGNIFSCSVM HEALHNRFTQ KSLSLSPGK (SEQ ID NO: 16)

[0369] Naturally occurring variants in G3Fc (for example, see Uniprot P01860) include E68Q, P76L, E79Q, Y81F, D97N, N100D, T124A, S169N, S169del, F221Y when converted to the numbering system used in SEQ ID NO: 15, and the present disclosure provides fusion proteins comprising G3Fc domains containing one or more of these variations. In addition, the human immunoglobulin IgG3 gene (IGHG3) shows a structural polymorphism characterized by different hinge lengths [see Uniprot P01859]. Specifically, variant WIS is lacking most of the V region and all of the CH1 region. It has an extra interchain disulfide bond at position 7 in addition to the 11 normally present in the hinge region. Variant ZUC lacks most of the V region, all of the CH1 region, and part of the hinge. Variant OMM may represent an allelic form or another gamma chain subclass. The present disclosure provides additional fusion proteins comprising G3Fc domains containing one or more of these variants.

[0370] An example of a native amino acid sequence that may be used for the Fc portion of human IgG4 (G4Fc) is shown below (SEQ ID NO: 17). Dotted underline indicates the hinge region. In part, the disclosure provides polypeptides comprising, consisting of, or consisting essentially of an amino acid sequence with 70%, 80%, 85%, 86%, 87%, 88%, 89%, 90%, 91%, 92%, 93%, 94%, 95%, 96%, 97%, 98%, 99%, or 100% identity to SEQ ID NO: 17. In some embodiments, the disclosure relates to ActRIIB:ALK4 heteromultimer proteins comprising a variant ActRIIB-Fc fusion protein and an ALK4-Fc fusion protein wherein the variant ActRIIB-Fc fusion protein comprises an Fc domain that is at least 75%, 80%, 85%, 90%, 91%, 92%, 93%, 94%, 95%, 96%, 97%, 98%, 99%, or 100% identical to the amino acid sequence of SEQ ID NO: 17, and the ALK4-Fc fusion protein comprises an Fc domain that is at least 75%, 80%, 85%, 90%, 91%, 92%, 93%, 94%, 95%, 96%, 97%, 98%, 99%, or 100% identical to the amino acid sequence of SEQ ID NO: 17. In some embodiments, the disclosure relates to ActRIIB:ALK7 heteromultimer proteins comprising a variant ActRIIB-Fc fusion protein and an ALK7-Fc fusion protein wherein the variant ActRIIB-Fc fusion protein comprises an Fc domain that is at least 75%, 80%, 85%, 90%, 91%, 92%, 93%, 94%, 95%, 96%, 97%, 98%, 99%, or 100% identical to the amino acid sequence of SEQ ID NO: 17, and the ALK7-Fc fusion protein comprises an Fc domain that is at least 75%, 80%, 85%, 90%, 91%, 92%, 93%, 94%, 95%, 96%, 97%, 98%, 99%, or 100% identical to the amino acid sequence of SEQ ID NO: 17.

1 ESKYGPPCPS CPAPEFLGGP SVFLFPPKPK DTLMISRTPE VTCVVVDVSQ
51 EDPEVQFNWY VDGVEVHNAK TKPREEQFNS TYRVVSVLTV LHQDWLNGKE
101 YKCKVSNKGL PSSIEKTISK AKGQPREPQV YTLPPSQEEM TKNQVSLTCL
151 VKGFYPSDIA VEWESNGQPE NNYKTTPPVL DSDGSFFLYS RLTVDKSRWQ
201 EGNVFSCSVM HEALHNHYTQ KSLSLSLGK (SEQ ID NO: 17)

[0371] A variety of engineered mutations in the Fc domain are presented herein with respect to the G1Fc sequence (SEQ ID NO: 13), and analogous mutations in G2Fc, G3Fc, and G4Fc can be derived from their alignment with G1Fc in FIG. 3. Due to unequal hinge lengths, analogous Fc positions based on isotype alignment (FIG. 3) possess different amino acid numbers in SEQ ID NOs: 13, 14, 15, and 17. It can also be appreciated that a given amino acid position in an immunoglobulin sequence consisting of hinge, C_{H}2, and C_{H}3 regions (e.g., SEQ ID NOs: 13, 14, 15, 16, or 17) will be identified by a different number than the same position when numbering encompasses the entire IgG1 heavy-chain constant domain (consisting of the C_{H}1, hinge, C_{H}2, and C_{H}3 regions) as in the Uniprot database. For example, correspondence between selected C_{H}3 positions in a human G1Fc sequence (SEQ ID NO: 13), the human IgG1 heavy chain constant domain (Uniprot P01857), and the human IgG1 heavy chain is as follows.

Correspondence of C_{H}3 Positions in Different Numbering Systems

| | | |
|---|---|---|
| G1Fc (Numbering begins at first threonine in hinge region) | IgG1 heavy chain constant domain (Numbering begins at C_{H}1) | IgG1 heavy chain (EU numbering scheme of Kabat et al., 1991*) |
| Y127 | Y232 | Y349 |
| S132 | 5237 | 5354 |
| E134 | E239 | E356 |
| K138 | K243 | K360 |
| T144 | T249 | T366 |
| L146 | L251 | L368 |
| N162 | N267 | N384 |
| K170 | K275 | K392 |
| D177 | D282 | D399 |
| D179 | D284 | D401 |
| Y185 | Y290 | Y407 |
| K187 | K292 | K409 |
| H213 | H318 | H435 |
| K217 | K322 | K439 |

* Kabat et al. (eds) 1991; pp. 688-696 in Sequences of Proteins of Immunological lnterest, 5^{th} ed., Vol. 1, NlH, Bethesda, MD.

[0372] A problem that arises in large-scale production of asymmetric immunoglobulin-based proteins from a single cell line is known as the “chain association issue”. As confronted prominently in the production of bispecific antibodies, the chain-association issue concerns the challenge of efficiently producing a desired multichain protein from among the multiple combinations that inherently result when different heavy chains and/or light chains are produced in a single cell line [see, for example, Klein et al (2012) mAbs 4:653-663]. This problem is most acute when two different heavy chains and two different light chains are produced in the same cell, in which case there are a total of 16 possible chain combinations (although some of these are identical) when only one is typically desired. Nevertheless, the same principle accounts for diminished yield of a desired multichain fusion protein that incorporates only two different (asymmetric) heavy chains.

[0373] Various methods are known in the art that increase desired pairing of Fc-containing fusion polypeptide chains in a single cell line to produce a preferred asymmetric fusion protein at acceptable yields [see, for example, Klein et al (2012) mAbs 4:653-663; and Spiess et al (2015) Molecular Immunology 67(2A): 95-106]. Methods to obtain desired pairing of Fc-containing chains include, but are not limited to, charge-based pairing (electrostatic steering), “knobs-into-holes” steric pairing, SEEDbody pairing, and leucine zipper-based pairing. See, for example, Ridgway et al (1996) Protein Eng 9:617-621; Merchant et al (1998) Nat Biotech 16:677-681; Davis et al (2010) Protein Eng Des Sel 23:195-202; Gunasekaran et al (2010); 285:19637-19646; Wranik et al (2012) J Biol Chem 287:43331-43339; US5932448; WO 1993/011162; WO 2009/089004, and WO 2011/034605. As described herein, these methods may be used to generate heterodimers comprising a variant ActRIIB polypeptide and another, optionally different, variant ActRIIB polypeptide or an unmodified ActRIIB polypeptide.

[0374] For example, one means by which interaction between specific polypeptides may be promoted is by engineering protuberance-into-cavity (knob-into-holes) complementary regions such as described in Arathoon et al., U.S.7,183,076 and Carter et al., U.S.5,731,168. “Protuberances” are constructed by replacing small amino acid side chains from the interface of the first polypeptide (e.g., a first interaction pair) with larger side chains (e.g., tyrosine or tryptophan). Complementary “cavities” of identical or similar size to the protuberances are optionally created on the interface of the second polypeptide (e.g., a second interaction pair) by replacing large amino acid side chains with smaller ones (e.g., alanine or threonine). Where a suitably positioned and dimensioned protuberance or cavity exists at the interface of either the first or second polypeptide, it is only necessary to engineer a corresponding cavity or protuberance, respectively, at the adjacent interface.

[0375] At neutral pH (7.0), aspartic acid and glutamic acid are negatively charged, and lysine, arginine, and histidine are positively charged. These charged residues can be used to promote heterodimer formation and at the same time hinder homodimer formation. Attractive interactions take place between opposite charges and repulsive interactions occur between like charges. In part, protein complexes disclosed herein make use of the attractive interactions for promoting heteromultimer formation (e.g., heterodimer formation), and optionally repulsive interactions for hindering homodimer formation (e.g., homodimer formation) by carrying out site directed mutagenesis of charged interface residues.

[0376] For example, the IgG1 CH3 domain interface comprises four unique charge residue pairs involved in domain-domain interactions: Asp356-Lys439′, Glu357-Lys370′, Lys392-Asp399′, and Asp399-Lys409′ [residue numbering in the second chain is indicated by (′)]. It should be noted that the numbering scheme used here to designate residues in the IgG1 CH3 domain conforms to the EU numbering scheme of Kabat. Due to the 2-fold symmetry present in the CH3-CH3 domain interactions, each unique interaction will be represented twice in the structure (e.g., Asp-399-Lys409′ and Lys409-Asp399′). In the wild-type sequence, K409-D399′ favors both heterodimer and homodimer formation. A single mutation switching the charge polarity (e.g., K409E; positive to negative charge) in the first chain leads to unfavorable interactions for the formation of the first chain homodimer. The unfavorable interactions arise due to the repulsive interactions occurring between the same charges (negative-negative; K409E-D399′ and D399-K409E′). A similar mutation switching the charge polarity (D399K′; negative to positive) in the second chain leads to unfavorable interactions (K409′-D399K′ and D399K-K409′) for the second chain homodimer formation. But, at the same time, these two mutations (K409E and D399K′) lead to favorable interactions (K409E-D399K′ and D399-K409′) for the heterodimer formation.

[0377] The electrostatic steering effect on heterodimer formation and homodimer discouragement can be further enhanced by mutation of additional charge residues which may or may not be paired with an oppositely charged residue in the second chain including, for example, Arg355 and Lys360. The table below lists possible charge change mutations that can be used, alone or in combination, to enhance heteromultimer formation of the heteromultimers disclosed herein.

Examples of Pair-Wise Charged Residue Mutations to Enhance Heterodimer Formation

| | | | |
|---|---|---|---|
| Position in first chain | Mutation in first chain | Interacting position in second chain | Corresponding mutation in second chain |
| Lys409 | Asp or Glu | Asp399′ | Lys, Arg, or His |
| Lys392 | Asp or Glu | Asp399′ | Lys, Arg, or His |
| Lys439 | Asp or Glu | Asp356′ | Lys, Arg, or His |
| Lys370 | Asp or Glu | Glu357′ | Lys, Arg, or His |
| Asp399 | Lys, Arg, or His | Lys409′ | Asp or Glu |
| Asp399 | Lys, Arg, or His | Lys392′ | Asp or Glu |
| Asp356 | Lys, Arg, or His | Lys439′ | Asp or Glu |
| Glu357 | Lys, Arg, or His | Lys370′ | Asp or Glu |

[0378] In some embodiments, one or more residues that make up the CH3-CH3 interface in a fusion protein of the instant application are replaced with a charged amino acid such that the interaction becomes electrostatically unfavorable. For example, a positive-charged amino acid in the interface (e.g., a lysine, arginine, or histidine) is replaced with a negatively charged amino acid (e.g., aspartic acid or glutamic acid). Alternatively, or in combination with the forgoing substitution, a negative-charged amino acid in the interface is replaced with a positive-charged amino acid. In certain embodiments, the amino acid is replaced with a non-naturally occurring amino acid having the desired charge characteristic. It should be noted that mutating negatively charged residues (Asp or Glu) to His will lead to increase in side chain volume, which may cause steric issues. Furthermore, His proton donor- and acceptor-form depends on the localized environment. These issues should be taken into consideration with the design strategy. Because the interface residues are highly conserved in human and mouse IgG subclasses, electrostatic steering effects disclosed herein can be applied to human and mouse IgG1, IgG2, IgG3, and IgG4. This strategy can also be extended to modifying uncharged residues to charged residues at the CH3 domain interface.

[0379] Antibodies and Fc fusion proteins with reduced effector function may be produced by introducing changes in the amino acid sequence, including, but are not limited to, the Ala-Ala mutation described by Bluestone et al. (see WO 94/28027 and WO 98/47531; also see Xu et al. 2000 Cell Immunol 200; 16-26). Thus, in certain embodiments, Fc fusion proteins of the disclosure with mutations within the constant region including the Ala-Ala mutation may be used to reduce or abolish effector function. According to these embodiments, antibodies and Fc fusion proteins may comprise a mutation to an alanine at position 234 or a mutation to an alanine at position 235, or a combination thereof. In one embodiment, the antibody or Fc fusion protein comprises an IgG4 framework, wherein the Ala-Ala mutation would describe a mutation(s) from phenylalanine to alanine at position 234 and/or a mutation from leucine to alanine at position 235. In another embodiment, the antibody or Fc fusion protein comprises an IgG1 framework, wherein the Ala-Ala mutation would describe a mutation(s) from leucine to alanine at position 234 and/or a mutation from leucine to alanine at position 235. While alanine substitutions at these sites are effective in reducing ADCC in both human and murine antibodies, these substitutions are less effective at reducing CDC activity. Another single variant P329A, identified by a random mutagenesis approach to map the Clq binding site of the Fc, is highly effective at reducing CDC activity while retaining ADCC activity. A combination of L234A, L235A, and P329A (LALA-PG, Kabat positions) substitutions have been shown to effectively silence the effector function of human IgG1 antibodies. For a detailed discussion of LALA, LALA-PG, and other mutations, see Lo et al. (2017) 1 Biol. Chem. 292:3900-3908, the contents of which are hereby incorporated herein by reference in their entirety. In some embodiments, Fc fusion proteins of the disclosure comprise L234A, L235A, and P329G mutations (LALA-PG; Kabat positions) in the Fc region of the heavy chain. The antibody or Fc fusion protein may alternatively or additionally carry other mutations, including the point mutation K322A in the CH2 domain (Hezareh et al. 2001 J Virol. 75: 12161-8).

[0380] In particular embodiments, the antibody or Fc fusion protein may be modified to either enhance or inhibit complement dependent cytotoxicity (CDC). Modulated CDC activity may be achieved by introducing one or more amino acid substitutions, insertions, or deletions in an Fc region (see, e.g., U.S. Pat. No. 6,194,551). Alternatively, or additionally, cysteine residue(s) may be introduced in the Fc region, thereby allowing interchain disulfide bond formation in this region. The homodimeric antibody or Fc fusion protein thus generated may have improved or reduced internalization capability and/or increased or decreased complement-mediated cell killing. See Caron et al., J. Exp Med. 176:1191-1195 (1992) and Shopes, B. J. Immunol. 148:2918-2922 (1992), WO99/51642, Duncan & Winter Nature 322: 738-40 (1988); U.S. Pat. No. 5,648,260; U.S. Pat. No. 5,624,821; and WO94/29351.

[0381] In part, the disclosure provides desired pairing of asymmetric Fc-containing polypeptide chains using Fc sequences engineered to be complementary on the basis of charge pairing (electrostatic steering). One of a pair of Fc sequences with electrostatic complementarity can be arbitrarily fused to a variant ActRIIB polypeptide, ALK4 polypeptide, or an ALK7 polypeptide of the construct, with or without an optional linker, to generate a variant ActRIIB-Fc, ALK4-Fc, or ALK7-Fc fusion polypeptide. This single chain can be coexpressed in a cell of choice along with the Fc sequence complementary to the first Fc sequence to favor generation of the desired multichain construct (e.g., a variant ActRIIB-Fc:ALK4 heteromultimer). In this example based on electrostatic steering, SEQ ID NO: 18 [human G1Fc(E134K/D177K)] and SEQ ID NO: 19 [human G1Fc(K170D/K187D)] are examples of complementary Fc sequences in which the engineered amino acid substitutions are double underlined, and a variant ActRIIB polypeptide, ALK4 polypeptide, or an ALK7 polypeptide of the construct can be fused to either SEQ ID NO: 18 or SEQ ID NO: 19, but not both. Given the high degree of amino acid sequence identity between native hG1Fc, native hG2Fc, native hG3Fc, and native hG4Fc, it can be appreciated that amino acid substitutions at corresponding positions in hG2Fc, hG3Fc, or hG4Fc (see FIG. 3) will generate complementary Fc pairs which may be used instead of the complementary hG1Fc pair below (SEQ ID NOs: 18 and 19).

1 THTCPPCPAP ELLGGPSVFL FPPKPKDTLM ISRTPEVTCV VVDVSHEDPE
51 VKFNWYVDGV EVHNAKTKPR EEQYNSTYRV VSVLTVLHQD WLNGKEYKCK
101 VSNKALPAPI EKTISKAKGQ PREPQVYTLP PSRKEMTKNQ VSLTCLVKGF
151 YPSDIAVEWE SNGQPENNYK TTPPVLKSDG SFFLYSKLTV DKSRWQQGNV
201 FSCSVMHEAL HNHYTQKSLS LSPGK (SEQ ID NO: 18)

1 THTCPPCPAP ELLGGPSVFL FPPKPKDTLM ISRTPEVTCV VVDVSHEDPE
51 VKFNWYVDGV EVHNAKTKPR EEQYNSTYRV VSVLTVLHQD WLNGKEYKCK
101 VSNKALPAPI EKTISKAKGQ PREPQVYTLP PSREEMTKNQ VSLTCLVKGF
151 YPSDIAVEWE SNGQPENNYD TTPPVLDSDG SFFLYSDLTV DKSRWQQGNV
201 FSCSVMHEAL HNHYTQKSLS LSPGK (SEQ ID NO: 19)

[0382] In some embodiments, the disclosure relates to ActRIIB:ALK4 heteromultimer proteins comprising a variant ActRIIB-Fc fusion protein and an ALK4-Fc fusion protein wherein the variant ActRIIB-Fc fusion protein comprises an Fc domain that is at least 75%, 80%, 85%, 90%, 91%, 92%, 93%, 94%, 95%, 96%, 97%, 98%, 99%, or 100% identical to the amino acid sequence of SEQ ID NO: 19, and the ALK4-Fc fusion protein comprises an Fc domain that is at least 75%, 80%, 85%, 90%, 91%, 92%, 93%, 94%, 95%, 96%, 97%, 98%, 99%, or 100% identical to the amino acid sequence of SEQ ID NO: 18. In some embodiments, the disclosure relates to ActRIIB heteromultimer proteins comprising a variant ActRIIB-Fc fusion protein and an ALK4-Fc fusion protein wherein the variant ActRIIB-Fc fusion protein comprises an Fc domain that is at least 75%, 80%, 85%, 90%, 91%, 92%, 93%, 94%, 95%, 96%, 97%, 98%, 99%, or 100% identical to the amino acid sequence of SEQ ID NO: 18, and the ALK4-Fc fusion protein comprises an Fc domain that is at least 75%, 80%, 85%, 90%, 91%, 92%, 93%, 94%, 95%, 96%, 97%, 98%, 99%, or 100% identical to the amino acid sequence of SEQ ID NO: 19.

[0383] In some embodiments, the disclosure relates to ActRIIB:ALK7 heteromultimer proteins comprising a variant ActRIIB-Fc fusion protein and an ALK7-Fc fusion protein wherein the variant ActRIIB-Fc fusion protein comprises an Fc domain that is at least 75%, 80%, 85%, 90%, 91%, 92%, 93%, 94%, 95%, 96%, 97%, 98%, 99%, or 100% identical to the amino acid sequence of SEQ ID NO: 19, and the ALK7-Fc fusion protein comprises an Fc domain that is at least 75%, 80%, 85%, 90%, 91%, 92%, 93%, 94%, 95%, 96%, 97%, 98%, 99%, or 100% identical to the amino acid sequence of SEQ ID NO: 18. In some embodiments, the disclosure relates to ActRIIB:ALK7 heteromultimer proteins comprising a variant ActRIIB-Fc fusion protein and an ALK7-Fc fusion protein wherein the variant ActRIIB-Fc fusion protein comprises an Fc domain that is at least 75%, 80%, 85%, 90%, 91%, 92%, 93%, 94%, 95%, 96%, 97%, 98%, 99%, or 100% identical to the amino acid sequence of SEQ ID NO: 18, and the ALK7-Fc fusion protein comprises an Fc domain that is at least 75%, 80%, 85%, 90%, 91%, 92%, 93%, 94%, 95%, 96%, 97%, 98%, 99%, or 100% identical to the amino acid sequence of SEQ ID NO: 19.

[0384] In part, the disclosure provides desired pairing of asymmetric Fc-containing polypeptide chains using Fc sequences engineered for steric complementarity. In part, the disclosure provides knobs-into-holes pairing as an example of steric complementarity. One of a pair of Fc sequences with steric complementarity can be arbitrarily fused to a variant ActRIIB polypeptide, an ALK4 polypeptide, or an ALK7 polypeptide of the construct, with or without an optional linker, to generate a variant ActRIIB-Fc, ALK4-Fc, or ALK7-Fc fusion polypeptide. This single chain can be coexpressed in a cell of choice along with the Fc sequence complementary to the first Fc sequence to favor generation of the desired multichain construct. In this example based on knobs-into-holes pairing, SEQ ID NO: 20 [human G1Fc(T144Y)] and SEQ ID NO: 21 [human G1Fc(Y185T)] are examples of complementary Fc sequences in which the engineered amino acid substitutions are double underlined, and a variant ActRIIB polypeptide, ALK4 polypeptide, or ALK7 polypeptide of the construct can be fused to either SEQ ID NO: 20 or SEQ ID NO: 21, but not both. Given the high degree of amino acid sequence identity between native hG1Fc, native hG2Fc, native hG3Fc, and native hG4Fc, it can be appreciated that amino acid substitutions at corresponding positions in hG2Fc, hG3Fc, or hG4Fc (see FIG. 3) will generate complementary Fc pairs which may be used instead of the complementary hG1Fc pair below (SEQ ID NOs: 20 and 21).

1 THTCPPCPAP ELLGGPSVFL FPPKPKDTLM ISRTPEVTCV VVDVSHEDPE
51 VKFNWYVDGV EVHNAKTKPR EEQYNSTYRV VSVLTVLHQD WLNGKEYKCK
101 VSNKALPAPI EKTISKAKGQ PREPQVYTLP PSREEMTKNQ VSLYCLVKGF
151 YPSDIAVEWE SNGQPENNYK TTPPVLDSDG SFFLYSKLTV DKSRWQQGNV
201 FSCSVMHEAL HNHYTQKSLS LSPGK (SEQ ID NO: 20)

1 THTCPPCPAP ELLGGPSVFL FPPKPKDTLM ISRTPEVTCV VVDVSHEDPE
51 VKFNWYVDGV EVHNAKTKPR EEQYNSTYRV VSVLTVLHQD WLNGKEYKCK
101 VSNKALPAPI EKTISKAKGQ PREPQVYTLP PSREEMTKNQ VSLTCLVKGF
151 YPSDIAVEWE SNGQPENNYK TTPPVLDSDG SFFLTSKLTV DKSRWQQGNV
201 FSCSVMHEAL HNHYTQKSLS LSPGK (SEQ ID NO: 21)

[0385] In some embodiments, the disclosure relates to ActRIIB:ALK4 heteromultimer proteins comprising a variant ActRIIB-Fc fusion protein and an ALK4-Fc fusion protein wherein the variant ActRIIB-Fc fusion protein comprises an Fc domain that is at least 75%, 80%, 85%, 90%, 91%, 92%, 93%, 94%, 95%, 96%, 97%, 98%, 99%, or 100% identical to the amino acid sequence of SEQ ID NO: 21, and the ALK4-Fc fusion protein comprises an Fc domain that is at least 75%, 80%, 85%, 90%, 91%, 92%, 93%, 94%, 95%, 96%, 97%, 98%, 99%, or 100% identical to the amino acid sequence of SEQ ID NO: 20. In some embodiments, the disclosure relates to variant ActRIIB:ALK4 heteromultimer proteins comprising a variant ActRIIB-Fc fusion protein and an ALK4-Fc fusion protein wherein the variant ActRIIB-Fc fusion protein comprises an Fc domain that is at least 75%, 80%, 85%, 90%, 91%, 92%, 93%, 94%, 95%, 96%, 97%, 98%, 99%, or 100% identical to the amino acid sequence of SEQ ID NO: 20, and the ALK4-Fc fusion protein comprises an Fc domain that is at least 75%, 80%, 85%, 90%, 91%, 92%, 93%, 94%, 95%, 96%, 97%, 98%, 99%, or 100% identical to the amino acid sequence of SEQ ID NO: 21.

[0386] In some embodiments, the disclosure relates to ActRIIB:ALK7 heteromultimer proteins comprising a variant ActRIIB-Fc fusion protein and an ALK7-Fc fusion protein wherein the variant ActRIIB-Fc fusion protein comprises an Fc domain that is at least 75%, 80%, 85%, 90%, 91%, 92%, 93%, 94%, 95%, 96%, 97%, 98%, 99%, or 100% identical to the amino acid sequence of SEQ ID NO: 21, and the ALK7-Fc fusion protein comprises an Fc domain that is at least 75%, 80%, 85%, 90%, 91%, 92%, 93%, 94%, 95%, 96%, 97%, 98%, 99%, or 100% identical to the amino acid sequence of SEQ ID NO: 20. In some embodiments, the disclosure relates to ActRIIB:ALK7 heteromultimer proteins comprising a variant ActRIIB-Fc fusion protein and an ALK7-Fc fusion protein wherein the variant ActRIIB-Fc fusion protein comprises an Fc domain that is at least 75%, 80%, 85%, 90%, 91%, 92%, 93%, 94%, 95%, 96%, 97%, 98%, 99%, or 100% identical to the amino acid sequence of SEQ ID NO: 20, and the ALK7-Fc fusion protein comprises an Fc domain that is at least 75%, 80%, 85%, 90%, 91%, 92%, 93%, 94%, 95%, 96%, 97%, 98%, 99%, or 100% identical to the amino acid sequence of SEQ ID NO: 21.

[0387] An example of Fc complementarity based on knobs-into-holes pairing combined with an engineered disulfide bond is disclosed in SEQ ID NO: 22 [hG1Fc(S132C/T144W)] and SEQ ID NO: 23 [hG1Fc(Y127C/T144S/L146A/Y185V)]. The engineered amino acid substitutions in these sequences are double underlined, and variant ActRIIB polypeptide, ALK4 polypeptide, or ALK7 polypeptide of the construct can be fused to either SEQ ID NO: 22 or SEQ ID NO: 23, but not both. Given the high degree of amino acid sequence identity between native hG1Fc, native hG2Fc, native hG3Fc, and native hG4Fc, it can be appreciated that amino acid substitutions at corresponding positions in hG2Fc, hG3Fc, or hG4Fc (see FIG. 3) will generate complementary Fc pairs which may be used instead of the complementary hG1Fc pair below (SEQ ID NOs: 22 and 23).

1 THTCPPCPAP ELLGGPSVFL FPPKPKDTLM ISRTPEVTCV VVDVSHEDPE
51 VKFNWYVDGV EVHNAKTKPR EEQYNSTYRV VSVLTVLHQD WLNGKEYKCK
101 VSNKALPAPI EKTISKAKGQ PREPQVYTLP PCREEMTKNQ VSLWCLVKGF
151 YPSDIAVEWE SNGQPENNYK TTPPVLDSDG SFFLYSKLTV DKSRWQQGNV
201 FSCSVMHEAL HNHYTQKSLS LSPGK (SEQ ID NO: 22)

1 THTCPPCPAP ELLGGPSVFL FPPKPKDTLM ISRTPEVTCV VVDVSHEDPE
51 VKFNWYVDGV EVHNAKTKPR EEQYNSTYRV VSVLTVLHQD WLNGKEYKCK
101 VSNKALPAPI EKTISKAKGQ PREPQVCTLP PSREEMTKNQ VSLSCAVKGF
151 YPSDIAVEWE SNGQPENNYK TTPPVLDSDG SFFLVSKLTV DKSRWQQGNV
201 FSCSVMHEAL HNHYTQKSLS LSPGK (SEQ ID NO: 23)

[0388] In some embodiments, the disclosure relates to ActRIIB:ALK4 heteromultimer proteins comprising a variant ActRIIB-Fc fusion protein and an ALK4-Fc fusion protein wherein the variant ActRIIB-Fc fusion protein comprises an Fc domain that is at least 75%, 80%, 85%, 90%, 91%, 92%, 93%, 94%, 95%, 96%, 97%, 98%, 99%, or 100% identical to the amino acid sequence of SEQ ID NO: 23, and the ALK4-Fc fusion protein comprises an Fc domain that is at least 75%, 80%, 85%, 90%, 91%, 92%, 93%, 94%, 95%, 96%, 97%, 98%, 99%, or 100% identical to the amino acid sequence of SEQ ID NO: 22. In some embodiments, the disclosure relates to ActRIIB:ALK4 heteromultimer proteins comprising a variant ActRIIB-Fc fusion protein and an ALK4-Fc fusion protein wherein the variant ActRIIB-Fc fusion protein comprises an Fc domain that is at least 75%, 80%, 85%, 90%, 91%, 92%, 93%, 94%, 95%, 96%, 97%, 98%, 99%, or 100% identical to the amino acid sequence of SEQ ID NO: 22, and the ALK4-Fc fusion protein comprises an Fc domain that is at least 75%, 80%, 85%, 90%, 91%, 92%, 93%, 94%, 95%, 96%, 97%, 98%, 99%, or 100% identical to the amino acid sequence of SEQ ID NO: 23. In some embodiments, the disclosure relates to ActRIIB:ALK7 heteromultimer proteins comprising a variant ActRIIB-Fc fusion protein and an ALK7-Fc fusion protein wherein the variant ActRIIB-Fc fusion protein comprises an Fc domain that is at least 75%, 80%, 85%, 90%, 91%, 92%, 93%, 94%, 95%, 96%, 97%, 98%, 99%, or 100% identical to the amino acid sequence of SEQ ID NO: 23, and the ALK7-Fc fusion protein comprises an Fc domain that is at least 75%, 80%, 85%, 90%, 91%, 92%, 93%, 94%, 95%, 96%, 97%, 98%, 99%, or 100% identical to the amino acid sequence of SEQ ID NO: 22. In some embodiments, the disclosure relates to ActRIIB:ALK7 heteromultimer proteins comprising a variant ActRIIB-Fc fusion protein and an ALK7-Fc fusion protein wherein the variant ActRIIB-Fc fusion protein comprises an Fc domain that is at least 75%, 80%, 85%, 90%, 91%, 92%, 93%, 94%, 95%, 96%, 97%, 98%, 99%, or 100% identical to the amino acid sequence of SEQ ID NO: 22, and the ALK7-Fc fusion protein comprises an Fc domain that is at least 75%, 80%, 85%, 90%, 91%, 92%, 93%, 94%, 95%, 96%, 97%, 98%, 99%, or 100% identical to the amino acid sequence of SEQ ID NO: 23.

[0389] In part, the disclosure provides desired pairing of asymmetric Fc-containing polypeptide chains using Fc sequences engineered to generate interdigitating β-strand segments of human IgG and IgA C_{H}3 domains. Such methods include the use of strand-exchange engineered domain (SEED) C_{H}3 heterodimers allowing the formation of SEEDbody fusion proteins [see, for example, Davis et al (2010) Protein Eng Design Sel 23:195-202]. One of a pair of Fc sequences with SEEDbody complementarity can be arbitrarily fused to a first variant ActRIIB polypeptide, second variant ActRIIB polypeptide, or unmodified ActRIIB polypeptide of the construct, with or without an optional linker, to generate a variant ActRIIB-Fc or unmodified ActRIIB-Fc fusion polypeptide. This single chain can be coexpressed in a cell of choice along with the Fc sequence complementary to the first Fc sequence to favor generation of the desired multichain construct. In this example based on SEEDbody (Sb) pairing, SEQ ID NO: 24 [hG1Fc(Sb_{AG})] and SEQ ID NO: 25 [hG1Fc(Sb_{GA})] are examples of complementary IgG Fc sequences in which the engineered amino acid substitutions from IgA Fc are double underlined, and a first variant ActRIIB polypeptide, second variant ActRIIB polypeptide, or unmodified ActRIIB polypeptide of the construct can be fused to either SEQ ID NO: 24 or SEQ ID NO: 25, but not both. Given the high degree of amino acid sequence identity between native hG1Fc, native hG2Fc, native hG3Fc, and native hG4Fc, it can be appreciated that amino acid substitutions at corresponding positions in hG1Fc, hG2Fc, hG3Fc, or hG4Fc (see FIG. 3) will generate an Fc monomer which may be used in the complementary IgG-IgA pair below (SEQ ID NOs: 24 and 25).

1 THTCPPCPAP ELLGGPSVFL FPPKPKDTLM ISRTPEVTCV VVDVSHEDPE
51 VKFNWYVDGV EVHNAKTKPR EEQYNSTYRV VSVLTVLHQD WLNGKEYKCK
101 VSNKALPAPI EKTISKAKGQ PFRPEVHLLP PSREEMTKNQ VSLTCLARGF
151 YPKDIAVEWE SNGQPENNYK TTPSRQEPSQ GTTTFAVTSK LTVDKSRWQQ
201 GNVFSCSVMH EALHNHYTQK TISLSPGK (SEQ ID NO: 24)

1 THTCPPCPAP ELLGGPSVFL FPPKPKDTLM ISRTPEVTCV VVDVSHEDPE
51 VKFNWYVDGV EVHNAKTKPR EEQYNSTYRV VSVLTVLHQD WLNGKEYKCK
101 VSNKALPAPI EKTISKAKGQ PREPQVYTLP PPSEELALNE LVTLTCLVKG
151 FYPSDIAVEW ESNGQELPRE KYLTWAPVLD SDGSFFLYSI LRVAAEDWKK
201 GDTFSCSVMH EALHNHYTQK SLDRSPGK (SEQ ID NO: 25)

[0390] In some embodiments, the disclosure relates to ActRIIB:ALK4 heteromultimer proteins comprising a variant ActRIIB-Fc fusion protein and an ALK4-Fc fusion protein wherein the variant ActRIIB-Fc fusion protein comprises an Fc domain that is at least 75%, 80%, 85%, 90%, 91%, 92%, 93%, 94%, 95%, 96%, 97%, 98%, 99%, or 100% identical to the amino acid sequence of SEQ ID NO: 25, and the ALK4-Fc fusion protein comprises an Fc domain that is at least 75%, 80%, 85%, 90%, 91%, 92%, 93%, 94%, 95%, 96%, 97%, 98%, 99%, or 100% identical to the amino acid sequence of SEQ ID NO: 24. In some embodiments, the disclosure relates to ActRIIB:ALK4 heteromultimer proteins comprising a variant ActRIIB-Fc fusion protein and an ALK4-Fc fusion protein wherein the variant ActRIIB-Fc fusion protein comprises an Fc domain that is at least 75%, 80%, 85%, 90%, 91%, 92%, 93%, 94%, 95%, 96%, 97%, 98%, 99%, or 100% identical to the amino acid sequence of SEQ ID NO: 24, and the ALK4-Fc fusion protein comprises an Fc domain that is at least 75%, 80%, 85%, 90%, 91%, 92%, 93%, 94%, 95%, 96%, 97%, 98%, 99%, or 100% identical to the amino acid sequence of SEQ ID NO: 25. In some embodiments, the disclosure relates to ActRIIB:ALK7 heteromultimer proteins comprising a variant ActRIIB-Fc fusion protein and an ALK7-Fc fusion protein wherein the variant ActRIIB-Fc fusion protein comprises an Fc domain that is at least 75%, 80%, 85%, 90%, 91%, 92%, 93%, 94%, 95%, 96%, 97%, 98%, 99%, or 100% identical to the amino acid sequence of SEQ ID NO: 25, and the ALK7-Fc fusion protein comprises an Fc domain that is at least 75%, 80%, 85%, 90%, 91%, 92%, 93%, 94%, 95%, 96%, 97%, 98%, 99%, or 100% identical to the amino acid sequence of SEQ ID NO: 24. In some embodiments, the disclosure relates to ActRIIB:ALK7 heteromultimer proteins comprising a variant ActRIIB-Fc fusion protein and an ALK7-Fc fusion protein wherein the variant ActRIIB-Fc fusion protein comprises an Fc domain that is at least 75%, 80%, 85%, 90%, 91%, 92%, 93%, 94%, 95%, 96%, 97%, 98%, 99%, or 100% identical to the amino acid sequence of SEQ ID NO: 24, and the ALK7-Fc fusion protein comprises an Fc domain that is at least 75%, 80%, 85%, 90%, 91%, 92%, 93%, 94%, 95%, 96%, 97%, 98%, 99%, or 100% identical to the amino acid sequence of SEQ ID NO: 25.

[0391] In part, the disclosure provides desired pairing of asymmetric Fc-containing polypeptide chains with a cleavable leucine zipper domain attached at the C-terminus of the Fc C_{H}3 domains. Attachment of a leucine zipper is sufficient to cause preferential assembly of heterodimeric antibody heavy chains. See, e.g., Wranik et al (2012) J Biol Chem 287:43331-43339. As disclosed herein, one of a pair of Fc sequences attached to a leucine zipper-forming strand can be arbitrarily fused to a first variant ActRIIB polypeptide, second variant ActRIIB polypeptide, or unmodified ActRIIB polypeptide of the construct, with or without an optional linker, to generate a variant ActRIIB-Fc or unmodified ActRIIB-Fc fusion polypeptide. This single chain can be coexpressed in a cell of choice along with the Fc sequence attached to a complementary leucine zipper-forming strand to favor generation of the desired multichain construct. Proteolytic digestion of the construct with the bacterial endoproteinase Lys-C post purification can release the leucine zipper domain, resulting in an Fc construct whose structure is identical to that of native Fc. In this example based on leucine zipper pairing, SEQ ID NO: 26 [hG1Fc-Ap1 (acidic)] and SEQ ID NO: 27 [hG1Fc-Bp1 (basic)] are examples of complementary IgG Fc sequences in which the engineered complimentary leucine zipper sequences are underlined, and a first variant ActRIIB polypeptide, second variant ActRIIB polypeptide, or wild-type ActRIIB polypeptide of the construct can be fused to either SEQ ID NO: 26 or SEQ ID NO: 27, but not both. Given the high degree of amino acid sequence identity between native hG1Fc, native hG2Fc, native hG3Fc, and native hG4Fc, it can be appreciated that leucine zipper-forming sequences attached, with or without an optional linker, to hG1Fc, hG2Fc, hG3Fc, or hG4Fc (see FIG. 3) will generate an Fc monomer which may be used in the complementary leucine zipper-forming pair below (SEQ ID NOs: 26 and 27).

1 THTCPPCPAP ELLGGPSVFL FPPKPKDTLM ISRTPEVTCV VVDVSHEDPE
51 VKFNWYVDGV EVHNAKTKPR EEQYNSTYRV VSVLTVLHQD WLNGKEYKCK
101 VSNKALPAPI EKTISKAKGQ PREPQVYTLP PSREEMTKNQ VSLTCLVKGF
151 YPSDIAVEWE SNGQPENNYK TTPPVLDSDG SFFLYSKLTV DKSRWQQGNV
201 FSCSVMHEAL HNHYTQKSLS LSPGKGGSAQ LEKELQALEK ENAQLEWELQ
251 ALEKELAQGA T (SEQ ID NO: 26)

1 THTCPPCPAP ELLGGPSVFL FPPKPKDTLM ISRTPEVTCV VVDVSHEDPE
51 VKFNWYVDGV EVHNAKTKPR EEQYNSTYRV VSVLTVLHQD WLNGKEYKCK
101 VSNKALPAPI EKTISKAKGQ PREPQVYTLP PSREEMTKNQ VSLTCLVKGF
151 YPSDIAVEWE SNGQPENNYK TTPPVLDSDG SFFLYSKLTV DKSRWQQGNV
201 FSCSVMHEAL HNHYTQKSLS LSPGKGGSAQ LKKKLQALKK KNAQLKWKLQ
251 ALKKKLAQGA T (SEQ ID NO: 27)

[0392] In some embodiments, the disclosure relates to ActRIIB:ALK4 heteromultimer proteins comprising a variant ActRIIB-Fc fusion protein and an ALK4-Fc fusion protein wherein the variant ActRIIB-Fc fusion protein comprises an Fc domain that is at least 75%, 80%, 85%, 90%, 91%, 92%, 93%, 94%, 95%, 96%, 97%, 98%, 99%, or 100% identical to the amino acid sequence of SEQ ID NO: 27, and the ALK4-Fc fusion protein comprises an Fc domain that is at least 75%, 80%, 85%, 90%, 91%, 92%, 93%, 94%, 95%, 96%, 97%, 98%, 99%, or 100% identical to the amino acid sequence of SEQ ID NO: 26. In some embodiments, the disclosure relates to ActRIIB:ALK4 heteromultimer proteins comprising a variant ActRIIB-Fc fusion protein and an ALK4-Fc fusion protein wherein the variant ActRIIB-Fc fusion protein comprises an Fc domain that is at least 75%, 80%, 85%, 90%, 91%, 92%, 93%, 94%, 95%, 96%, 97%, 98%, 99%, or 100% identical to the amino acid sequence of SEQ ID NO: 26, and the ALK4-Fc fusion protein comprises an Fc domain that is at least 75%, 80%, 85%, 90%, 91%, 92%, 93%, 94%, 95%, 96%, 97%, 98%, 99%, or 100% identical to the amino acid sequence of SEQ ID NO: 27. In some embodiments, the disclosure relates to ActRIIB:ALK7 heteromultimer proteins comprising a variant ActRIIB-Fc fusion protein and an ALK7-Fc fusion protein wherein the variant ActRIIB-Fc fusion protein comprises an Fc domain that is at least 75%, 80%, 85%, 90%, 91%, 92%, 93%, 94%, 95%, 96%, 97%, 98%, 99%, or 100% identical to the amino acid sequence of SEQ ID NO: 27, and the ALK7-Fc fusion protein comprises an Fc domain that is at least 75%, 80%, 85%, 90%, 91%, 92%, 93%, 94%, 95%, 96%, 97%, 98%, 99%, or 100% identical to the amino acid sequence of SEQ ID NO: 26. In some embodiments, the disclosure relates to ActRIIB:ALK7 heteromultimer proteins comprising a variant ActRIIB-Fc fusion protein and an ALK7-Fc fusion protein wherein the variant ActRIIB-Fc fusion protein comprises an Fc domain that is at least 75%, 80%, 85%, 90%, 91%, 92%, 93%, 94%, 95%, 96%, 97%, 98%, 99%, or 100% identical to the amino acid sequence of SEQ ID NO: 26, and the ALK7-Fc fusion protein comprises an Fc domain that is at least 75%, 80%, 85%, 90%, 91%, 92%, 93%, 94%, 95%, 96%, 97%, 98%, 99%, or 100% identical to the amino acid sequence of SEQ ID NO: 27.

[0393] In part, the disclosure provides desired pairing of asymmetric Fc-containing polypeptide chains by methods described above in combination with additional mutations in the Fc domain which facilitate purification of the desired heteromeric species. An example uses complementarity of Fc domains based on knobs-into-holes pairing combined with an engineered disulfide bond, as disclosed in SEQ ID NOs: 22 and 23, plus additional substitution of two negatively charged amino acids (aspartic acid or glutamic acid) in one Fc-containing polypeptide chain and two positively charged amino acids (e.g., arginine) in the complementary Fc-containing polypeptide chain (SEQ ID NOs: 28-29). These four amino acid substitutions facilitate selective purification of the desired heteromeric fusion protein from a heterogeneous polypeptide mixture based on differences in isoelectric point or net molecular charge. The engineered amino acid substitutions in these sequences are double underlined below, and a variant ActRIIB polypeptide, an ALK4 polypeptide, or an ALK7 polypeptide of the construct can be fused to either SEQ ID NO: 28 or SEQ ID NO: 29, but not both. Given the high degree of amino acid sequence identity between native hG1Fc, native hG2Fc, native hG3Fc, and native hG4Fc, it can be appreciated that amino acid substitutions at corresponding positions in hG2Fc, hG3Fc, or hG4Fc (see FIG. 3) will generate complementary Fc pairs which may be used instead of the complementary hG1Fc pair below (SEQ ID NOs: 28-29).

1 THTCPPCPAP ELLGGPSVFL FPPKPKDTLM ISRTPEVTCV VVDVSHEDPE
51 VKFNWYVDGV EVHNAKTKPR EEQYNSTYRV VSVLTVLHQD WLNGKEYKCK
101 VSNKALPAPI EKTISKAKGQ PREPQVYTLP PCREEMTENQ VSLWCLVKGF
151 YPSDIAVEWE SNGQPENNYK TTPPVLDSDG SFFLYSKLTV DKSRWQQGNV
201 FSCSVMHEAL HNHYTQDSLS LSPGK (SEQ ID NO: 28)

1 THTCPPCPAP ELLGGPSVFL FPPKPKDTLM ISRTPEVTCV VVDVSHEDPE
51 VKFNWYVDGV EVHNAKTKPR EEQYNSTYRV VSVLTVLHQD WLNGKEYKCK
101 VSNKALPAPI EKTISKAKGQ PREPQVCTLP PSREEMTKNQ VSLSCAVKGF
151 YPSDIAVEWE SRGQPENNYK TTPPVLDSRG SFFLVSKLTV DKSRWQQGNV
201 FSCSVMHEAL HNHYTQKSLS LSPGK (SEQ ID NO: 29)

[0394] In some embodiments, the disclosure relates to ActRIIB:ALK4 heteromultimer proteins comprising a variant ActRIIB-Fc fusion protein and an ALK4-Fc fusion protein wherein the variant ActRIIB-Fc fusion protein comprises an Fc domain that is at least 75%, 80%, 85%, 90%, 91%, 92%, 93%, 94%, 95%, 96%, 97%, 98%, 99%, or 100% identical to the amino acid sequence of SEQ ID NO: 28, and the ALK4-Fc fusion protein comprises an Fc domain that is at least 75%, 80%, 85%, 90%, 91%, 92%, 93%, 94%, 95%, 96%, 97%, 98%, 99%, or 100% identical to the amino acid sequence of SEQ ID NO: 29. In some embodiments, the disclosure relates to ActRIIB:ALK7 heteromultimer proteins comprising a variant ActRIIB-Fc fusion protein and an ALK7-Fc fusion protein wherein the variant ActRIIB-Fc fusion protein comprises an Fc domain that is at least 75%, 80%, 85%, 90%, 91%, 92%, 93%, 94%, 95%, 96%, 97%, 98%, 99%, or 100% identical to the amino acid sequence of SEQ ID NO: 28, and the ALK7-Fc fusion protein comprises an Fc domain that is at least 75%, 80%, 85%, 90%, 91%, 92%, 93%, 94%, 95%, 96%, 97%, 98%, 99%, or 100% identical to the amino acid sequence of SEQ ID NO: 29. In some embodiments, the variant ActRIIB-Fc fusion protein Fc domain comprises a cysteine at amino acid position 132, glutamic acid at amino acid position 138, a tryptophan at amino acid position 144, and an aspartic acid at amino acid position 217. In some embodiments, the ALK4-Fc fusion protein Fc domain comprises a cysteine at amino acid position 127, a serine at amino acid position 144, an alanine at amino acid position 146, an arginine at amino acid position 162, an arginine at amino acid position 179, and a valine at amino acid position 185. In some embodiments, the ALK7-Fc fusion protein Fc domain comprises a cysteine at amino acid position 127, a serine at amino acid position 144, an alanine at amino acid position 146, an arginine at amino acid position 162, an arginine at amino acid position 179, and a valine at amino acid position 185.

[0395] In some embodiments, the disclosure relates to ActRIIB:ALK4 heteromultimer proteins comprising a variant ActRIIB-Fc fusion protein and an ALK4-Fc fusion protein wherein the ALK4-Fc fusion protein comprises an Fc domain that is at least 75%, 80%, 85%, 90%, 91%, 92%, 93%, 94%, 95%, 96%, 97%, 98%, 99%, or 100% identical to the amino acid sequence of SEQ ID NO: 28, and the variant ActRIIB-Fc fusion protein comprises an Fc domain that is at least 75%, 80%, 85%, 90%, 91%, 92%, 93%, 94%, 95%, 96%, 97%, 98%, 99%, or 100% identical to the amino acid sequence of SEQ ID NO: 29. In some embodiments, the disclosure relates to ActRIIB:ALK7 heteromultimer proteins comprising a variant ActRIIB-Fc fusion protein and an ALK7-Fc fusion protein wherein the ALK7-Fc fusion protein comprises an Fc domain that is at least 75%, 80%, 85%, 90%, 91%, 92%, 93%, 94%, 95%, 96%, 97%, 98%, 99%, or 100% identical to the amino acid sequence of SEQ ID NO: 28, and the variant ActRIIB-Fc fusion protein comprises an Fc domain that is at least 75%, 80%, 85%, 90%, 91%, 92%, 93%, 94%, 95%, 96%, 97%, 98%, 99%, or 100% identical to the amino acid sequence of SEQ ID NO: 29. In some embodiments, the ALK4-Fc fusion protein Fc domain comprises a cysteine at amino acid position 132, glutamic acid at amino acid position 138, a tryptophan at amino acid position 144, and an aspartic acid at amino acid position 217. In some embodiments, the variant ActRIIB-Fc fusion protein Fc domain comprises a cysteine at amino acid position 127, a serine at amino acid position 144, an alanine at amino acid position 146, an arginine at amino acid position 162, an arginine at amino acid position 179, and a valine at amino acid position 185. In some embodiments, the ALK7-Fc fusion protein Fc domain comprises a cysteine at amino acid position 132, glutamic acid at amino acid position 138, a tryptophan at amino acid position 144, and an aspartic acid at amino acid position 217. In some embodiments, the variant ActRIIB-Fc fusion protein Fc domain comprises a cysteine at amino acid position 127, a serine at amino acid position 144, an alanine at amino acid position 146, an arginine at amino acid position 162, an arginine at amino acid position 179, and a valine at amino acid position 185.

[0396] Another example involves complementarity of Fc domains based on knobs-into-holes pairing combined with an engineered disulfide bond, as disclosed in SEQ ID NOs: 22-23, plus a histidine-to-arginine substitution at position 213 in one Fc-containing polypeptide chain (SEQ ID NO: 30). This substitution (denoted H435R in the numbering system of Kabat et al.) facilitates separation of desired heteromer from undesirable homodimer based on differences in affinity for protein A. The engineered amino acid substitution is indicated by double underline, and a variant ActRIIB polypeptide, ALK4 polypeptide, or ALK7 polypeptide of the construct can be fused to either SEQ ID NO: 30 or SEQ ID NO: 23, but not both. Given the high degree of amino acid sequence identity between native hG1Fc, native hG2Fc, native hG3Fc, and native hG4Fc, it can be appreciated that amino acid substitutions at corresponding positions in hG2Fc, hG3Fc, or hG4Fc (see FIG. 3) will generate complementary Fc pairs which may be used instead of the complementary hG1Fc pair of SEQ ID NO: 30 (below) and SEQ ID NO: 23.

1 THTCPPCPAP ELLGGPSVFL FPPKPKDTLM ISRTPEVTCV VVDVSHEDPE
51 VKFNWYVDGV EVHNAKTKPR EEQYNSTYRV VSVLTVLHQD WLNGKEYKCK
101 VSNKALPAPI EKTISKAKGQ PREPQVYTLP PCREEMTKNQ VSLWCLVKGF
151 YPSDIAVEWE SNGQPENNYK TTPPVLDSDG SFFLYSKLTV DKSRWQQGNV
201 FSCSVMHEAL HNRYTQKSLS LSPGK (SEQ ID NO: 30)

[0397] In some embodiments, the disclosure relates to ActRIIB:ALK4 heteromultimer proteins comprising a variant ActRIIB-Fc fusion protein and an ALK4-Fc fusion protein wherein the variant ActRIIB-Fc fusion protein comprises an Fc domain that is at least 75%, 80%, 85%, 90%, 91%, 92%, 93%, 94%, 95%, 96%, 97%, 98%, 99%, or 100% identical to the amino acid sequence of SEQ ID NO: 30, and the ALK4-Fc fusion protein comprises an Fc domain that is at least 75%, 80%, 85%, 90%, 91%, 92%, 93%, 94%, 95%, 96%, 97%, 98%, 99%, or 100% identical to the amino acid sequence of SEQ ID NO: 23. In some embodiments, the disclosure relates to ActRIIB:ALK7 heteromultimer proteins comprising a variant ActRIIB-Fc fusion protein and an ALK7-Fc fusion protein wherein the variant ActRIIB-Fc fusion protein comprises an Fc domain that is at least 75%, 80%, 85%, 90%, 91%, 92%, 93%, 94%, 95%, 96%, 97%, 98%, 99%, or 100% identical to the amino acid sequence of SEQ ID NO: 30, and the ALK7-Fc fusion protein comprises an Fc domain that is at least 75%, 80%, 85%, 90%, 91%, 92%, 93%, 94%, 95%, 96%, 97%, 98%, 99%, or 100% identical to the amino acid sequence of SEQ ID NO: 23. In some embodiments, the variant ActRIIB-Fc fusion protein Fc domain comprises a cysteine at amino acid position 132, a tryptophan at amino acid position 144, and an arginine at amino acid position 435. In some embodiments, the ALK4-Fc fusion protein Fc domain comprises cysteine at amino acid position 127, a serine at amino acid position 144, an alanine at amino acid position 146, and a valine at amino acid position 185. In some embodiments, the ALK7-Fc fusion protein Fc domain comprises cysteine at amino acid position 127, a serine at amino acid position 144, an alanine at amino acid position 146, and a valine at amino acid position 185.

[0398] In some embodiments, the disclosure relates to ActRIIB:ALK4 heteromultimer proteins comprising a variant ActRIIB-Fc fusion protein and an ALK4-Fc fusion protein wherein the ALK4-Fc fusion protein comprises an Fc domain that is at least 75%, 80%, 85%, 90%, 91%, 92%, 93%, 94%, 95%, 96%, 97%, 98%, 99%, or 100% identical to the amino acid sequence of SEQ ID NO: 30, and the variant ActRIIB-Fc fusion protein comprises an Fc domain that is at least 75%, 80%, 85%, 90%, 91%, 92%, 93%, 94%, 95%, 96%, 97%, 98%, 99%, or 100% identical to the amino acid sequence of SEQ ID NO: 23. In some embodiments, the disclosure relates to ActRIIB:ALK7 heteromultimer proteins comprising a variant ActRIIB-Fc fusion protein and an ALK7-Fc fusion protein wherein the ALK7-Fc fusion protein comprises an Fc domain that is at least 75%, 80%, 85%, 90%, 91%, 92%, 93%, 94%, 95%, 96%, 97%, 98%, 99%, or 100% identical to the amino acid sequence of SEQ ID NO: 30, and the variant ActRIIB-Fc fusion protein comprises an Fc domain that is at least 75%, 80%, 85%, 90%, 91%, 92%, 93%, 94%, 95%, 96%, 97%, 98%, 99%, or 100% identical to the amino acid sequence of SEQ ID NO: 23 In some embodiments, the ALK4-Fc fusion protein Fc domain comprises a cysteine at amino acid position 132, a tryptophan at amino acid position 144, and an arginine at amino acid position 435. In some embodiments, the ALK7-Fc fusion protein Fc domain comprises a cysteine at amino acid position 132, a tryptophan at amino acid position 144, and an arginine at amino acid position 435. In some embodiments, the variant ActRIIB-Fc fusion protein Fc domain comprises cysteine at amino acid position 127, a serine at amino acid position 144, an alanine at amino acid position 146, and a valine at amino acid position 185.

[0399] A variety of engineered mutations in the Fc domain are presented above with respect to the G1Fc sequence (SEQ ID NO: 13). Analogous mutations in G2Fc, G3Fc, and G4Fc can be derived from their alignment with G1Fc in FIG. 3. Due to unequal hinge lengths, analogous Fc positions based on isotype alignment (FIG. 3) possess different amino acid numbers in SEQ ID NOs: 13, 14, 15, 16, and 17 as summarized in the following table.

Correspondence between C_{H}3 Positions for Human Fc lsotypes∗

| IgG1 | IgG4 | IgG2 | IgG3 |
|---|---|---|---|
| SEQ ID NO: 13 | SEQ ID NO: 17 | SEQ ID NO: 14 | SEQ ID NO: 15 |
| Numbering begins at THT... | Numbering begins at ESK... | Numbering begins at VEC... | Numbering begins at EPK... |
| Y127 | Y131 | Y125 | Y134 |
| S132 | S136 | S130 | 5139 |
| E134 | E138 | E132 | E141 |
| K138 | K142 | K136 | K145 |
| T144 | T148 | T142 | T151 |
| L146 | L150 | L144 | L153 |
| N162 | N166 | N160 | 5169 |
| K170 | K174 | K168 | N177 |
| D177 | D181 | D175 | D184 |
| D179 | D183 | D177 | D186 |
| Y185 | Y189 | Y183 | Y192 |
| K187 | R191 | K185 | K194 |
| H213 | H217 | H211 | R220 |
| K217 | K221 | K215 | K224 |

^{∗} Numbering based on multiple sequence alignment shown in FIG. 3

[0400] It is understood that different elements of the fusion proteins (e.g., immunoglobulin Fc fusion proteins) may be arranged in any manner that is consistent with desired functionality. For example, a variant ActRIIB polypeptide domain may be placed C-terminal to a heterologous domain, or alternatively, a heterologous domain may be placed C-terminal to a variant ActRIIB polypeptide domain. The variant ActRIIB polypeptide domain and the heterologous domain need not be adjacent in a fusion protein, and additional domains or amino acid sequences may be included C- or N-terminal to either domain or between the domains.

[0401] For example, a variant ActRIIB polypeptide may comprise an amino acid sequence as set forth in the formula A-B-C. The B portion corresponds to a variant ActRIIB polypeptide domain. The A and C portions may be independently zero, one, or more than one amino acid, and both the A and C portions when present are heterologous to B. The A and/or C portions may be attached to the B portion via a linker sequence. In certain embodiments, a variant ActRIIB fusion protein comprises an amino acid sequence as set forth in the formula A-B-C, wherein A is a leader (signal) sequence, B consists of a variant ActRIIB polypeptide domain, and C is a polypeptide portion that enhances one or more of in vivo stability, in vivo half-life, uptake/administration, tissue localization or distribution, formation of protein complexes, and/or purification. In certain embodiments, a variant ActRIIB fusion protein comprises an amino acid sequence as set forth in the formula A-B-C, wherein A is a TPA leader sequence, B consists of a variant ActRIIB polypeptide domain, and C is an immunoglobulin Fc domain.

[0402] In certain embodiments, the variant ActRIIB polypeptides of the present disclosure contain one or more modifications that are capable of stabilizing the variant ActRIIB polypeptides. For example, such modifications enhance the in vitro half-life of the variant ActRIIB polypeptides, enhance circulatory half-life of the variant ActRIIB polypeptides or reducing proteolytic degradation of the variant ActRIIB polypeptides. Such stabilizing modifications include, but are not limited to, fusion proteins (including, for example, fusion proteins comprising a variant ActRIIB polypeptide and a stabilizer domain), modifications of a glycosylation site (including, for example, addition of a glycosylation site to a variant ActRIIB polypeptide), and modifications of carbohydrate moiety (including, for example, removal of carbohydrate moieties from a variant ActRIIB polypeptide). In the case of fusion proteins, a variant ActRIIB polypeptide is fused to a stabilizer domain such as an IgG molecule (e.g., an Fc domain). As used herein, the term “stabilizer domain” not only refers to a fusion domain (e.g., Fc) as in the case of fusion proteins, but also includes nonproteinaceous modifications such as a carbohydrate moiety, or nonproteinaceous polymer, such as polyethylene glycol.

[0403] In certain embodiments, the present disclosure makes available isolated and/or purified forms of the variant ActRIIB polypeptides, which are isolated from, or otherwise substantially free of, other proteins.

[0404] In certain embodiments, variant ActRIIB polypeptides of the disclosure can be produced by a variety of art-known techniques. For example, such variant ActRIIB polypeptides can be synthesized using standard protein chemistry techniques such as those described in Bodansky, M. Principles of Peptide Synthesis, Springer Verlag, Berlin (1993) and Grant G. A. (ed.), Synthetic Peptides: A User’s Guide, W. H. Freeman and Company, New York (1992). In addition, automated peptide synthesizers are commercially available (e.g., Advanced ChemTech Model 396; Milligen/Biosearch 9600). Alternatively, the variant ActRIIB polypeptides, fragments or variants thereof may be recombinantly produced using various expression systems (e.g., E. coli, Chinese Hamster Ovary cells, COS cells, baculovirus) as is well known in the art (also see below). In a further embodiment, the variant ActRIIB polypeptides may be produced by digestion of naturally occurring or recombinantly produced full-length variant ActRIIB polypeptides by using, for example, a protease, e.g., trypsin, thermolysin, chymotrypsin, pepsin, or paired basic amino acid converting enzyme (PACE). Computer analysis (using a commercially available software, e.g., MacVector, Omega, PCGene, Molecular Simulation, Inc.) can be used to identify proteolytic cleavage sites. Alternatively, such variant ActRIIB polypeptides may be produced from naturally occurring or recombinantly produced full-length variant ActRIIB polypeptides such as standard techniques known in the art, such as by chemical cleavage (e.g., cyanogen bromide, hydroxylamine).

[0405] In certain embodiments, variant ActRIIB polypeptides of the disclosure can include a purification subsequence, such as an epitope tag, a FLAG tag, a polyhistidine sequence, and a GST fusion. Optionally, a variant ActRIIB polypeptide includes one or more modified amino acid residues selected from: a glycosylated amino acid, a PEGylated amino acid, a farnesylated amino acid, an acetylated amino acid, a biotinylated amino acid, an amino acid conjugated to a lipid moiety, and an amino acid conjugated to an organic derivatizing agent.

[0406] In some embodiments, the disclosure relates to variant ActRIIB polypeptides, including variant ActRIIB polypeptides as well as homomultimer and heteromultimers comprising the same, that comprise one or more amino acid modifications selected from the group consisting of: a glycosylated amino acid, a PEGylated amino acid, a farnesylated amino acid, an acetylated amino acid, a biotinylated amino acid, and an amino acid conjugated to a lipid moiety. In some embodiments, variant ActRIIB polypeptides of the disclosure are glycosylated and have a glycosylation pattern obtainable from of the polypeptide in a CHO cell.

### 3. Linkers

[0407] The disclosure provides for variant ActRIIB polypeptides that may be fused to any of the other polypeptides disclosed herein, or that may be fused to a heterologous portion (e.g., an Fc portion). In these embodiments, the polypeptide portion (e.g. a variant ActRIIB polypeptide) is connected to the other polypeptide (e.g., a TGFβRII polypeptide) and/or to the heterologous portion (e.g., Fc portion) by means of a linker. In some embodiments, the linkers are glycine and serine rich linkers. In some embodiments, the linker may be rich in glycine (e.g., 2-10, 2-5, 2-4, 2-3 glycine residues) or glycine and proline residues and may, for example, contain a single sequence of threonine/serine and glycines or repeating sequences of threonine/serine and/or glycines, e.g., GGG (SEQ ID NO: 261), GGGG (SEQ ID NO: 262), TGGGG(SEQ ID NO: 263), SGGGG(SEQ ID NO: 264), TGGG(SEQ ID NO: 265), or SGGG(SEQ ID NO: 266) singlets, or repeats. Other near neutral amino acids, such as, but not limited to, Thr, Asn, Pro and Ala, may also be used in the linker sequence. In some embodiments, the linker comprises various permutations of amino acid sequences containing Gly and Ser. In some embodiments, the linker is greater than 10 amino acids in length. In further embodiments, the linkers have a length of at least 12, 15, 20, 21, 25, 30, 35, 40, 45 or 50 amino acids. In some embodiments, the linker is less than 40, 35, 30, 25, 22 or 20 amino acids. In some embodiments, the linker is 10-50, 10-40, 10-30, 10-25, 10-21, 10-15, 10, 15-25, 17-22, 20, or 21 amino acids in length. In preferred embodiments, the linker comprises the amino acid sequence GlyGlyGlyGlySer (GGGGS) (SEQ ID NO: 267), or repetitions thereof (GGGGS)n, where n ≥ 2. In particular embodiments n ≥ 3, or n = 3-10. In some embodiments, n ≥ 4, or n = 4-10. In some embodiments, n is not greater than 4 in a (GGGGS)n linker. In some embodiments, n = 4-10, 4-9, 4-8, 4-7, 4-6, 4-5, 5-8, 5-7, or 5-6. In some embodiments, n = 3, 4, 5, 6, or 7. In particular embodiments, n = 4. In some embodiments, a linker comprising a (GGGGS)n sequence also comprises an N-terminal threonine. In some embodiments, the linker is any one of the following:

GGGGSGGGGS (SEQ ID NO: 268)

TGGGGSGGGGS (SEQ ID NO: 269)

TGGGGSGGGGSGGGGS (SEQ ID NO: 270)

TGGGGSGGGGSGGGGSGGGGS (SEQ ID NO: 271)

TGGGGSGGGGSGGGGSGGGGSGGGGS (SEQ ID NO: 272)

TGGGGSGGGGSGGGGSGGGGSGGGGSGGGGS
(SEQ ID NO: 273) or

TGGGGSGGGGSGGGGSGGGGSGGGGSGGGGSGGGGS
(SEQ ID NO: 274).

[0408] In some embodiments, the linker comprises the amino acid sequence of TGGGPKSCDK (SEQ ID NO: 275). In some embodiments, the linker is any one of SEQ ID NOs: 268-275 lacking the N-terminal threonine. In some embodiments, the linker does not comprise the amino acid sequence of SEQ ID NO: 273 or 274.

[0409] In some embodiments, a polypeptide described (e.g., variant ActRIIB proteins in either homomeric or heteromeric forms) herein may include a polypeptide fused to a moiety by way of a linker. In some embodiments, the moiety increases stability of the polypeptide. In some embodiments, the moiety is selected from the group consisting of an Fc domain monomer, a wild-type Fc domain, an Fc domain with amino acid substitutions (e.g., one or more substitutions that reduce dimerization), an albumin-binding peptide, a fibronectin domain, or a human serum albumin. Suitable peptide linkers are known in the art, and include, for example, peptide linkers containing flexible amino acid residues such as glycine, alanine, and serine. In some embodiments, a linker can contain motifs, e.g., multiple or repeating motifs, of GA, GS, GG, GGA, GGS, GGG, GGGA (SEQ ID NO: 280), GGGS (SEQ ID NO: 281), GGGG (SEQ ID NO: 262), GGGGA (SEQ ID NO: 282), GGGGS (SEQ ID NO: 267), GGGGG (SEQ ID NO: 283), GGAG (SEQ ID NO: 284), GGSG (SEQ ID NO: 285), AGGG (SEQ ID NO: 286), or SGGG (SEQ ID NO: 266). In some embodiments, a linker can contain 2 to 12 amino acids including motifs of GA or GS, e.g., GA, GS, GAGA (SEQ ID NO: 287), GSGS (SEQ ID NO: 288), GAGAGA (SEQ ID NO: 289), GSGSGS (SEQ ID NO: 290), GAGAGAGA (SEQ ID NO: 291), GSGSGSGS (SEQ ID NO: 292), GAGAGAGAGA (SEQ ID NO: 293), GSGSGSGSGS (SEQ ID NO: 294), GAGAGAGAGAGA (SEQ ID NO: 295), and GSGSGSGSGSGS (SEQ ID NO: 296). In some embodiments, a linker can contain 3 to 12 amino acids including motifs of GGA or GGS, e.g., GGA, GGS, GGAGGA (SEQ ID NO: 297), GGSGGS (SEQ ID NO: 298), GGAGGAGGA (SEQ ID NO: 299), GGSGGSGGS (SEQ ID NO: 300), GGAGGAGGAGGA (SEQ ID NO: 301), and GGSGGSGGSGGS (SEQ ID NO: 302). In some embodiments, a linker can contain 4 to 12 amino acids including motifs of GGAG (SEQ ID NO: 303), GGSG (SEQ ID NO: 304), GGAGGGAG (SEQ ID NO: 305), GGSGGGSG (SEQ ID NO: 306), GGAGGGAGGGAG (SEQ ID NO: 307), and GGSGGGSGGGSG (SEQ ID NO: 308). In some embodiments, a linker can contain motifs of GGGGA (SEQ ID NO: 309) or GGGGS (SEQ ID NO: 267), e.g., GGGGAGGGGAGGGGA (SEQ ID NO: 310) and GGGGSGGGGSGGGGS (SEQ ID NO: 311). In some embodiments, an amino acid linker between a moiety (e.g., an Fc domain monomer, a wild-type Fc domain, an Fc domain with amino acid substitutions (e.g., one or more substitutions that reduce dimerization), an albumin-binding peptide, a fibronectin domain, or a human serum albumin) and a polypeptide (e.g., variant ActRIIB proteins in either homomeric or heteromeric forms) may be GGG, GGGA (SEQ ID NO: 280), GGGG (SEQ ID NO: 262), GGGAG (SEQ ID NO: 312), GGGAGG (SEQ ID NO: 313), or GGGAGGG (SEQ ID NO: 314).

[0410] In some embodiments, a linker can also contain amino acids other than glycine, alanine, and serine, e.g., AAAL (SEQ ID NO: 315), AAAK (SEQ ID NO: 316), AAAR (SEQ ID NO: 317), EGKSSGSGSESKST (SEQ ID NO: 318), GSAGSAAGSGEF (SEQ ID NO: 319), AEAAAKEAAAKA (SEQ ID NO: 320), KESGSVSSEQLAQFRSLD (SEQ ID NO: 321), GENLYFQSGG (SEQ ID NO: 322), SACYCELS (SEQ ID NO: 323), RSIAT (SEQ ID NO: 324), RPACKIPNDLKQKVMNH (SEQ ID NO: 325), GGSAGGSGSGSSGGSSGASGTGTAGGTGSGSGTGSG (SEQ ID NO: 326), AAANSSIDLISVPVDSR (SEQ ID NO: 327), or GGSGGGSEGGGSEGGGSEGGGSEGGGSEGGGSGGGS (SEQ ID NO: 328). In some embodiments, a linker can contain motifs, e.g., multiple or repeating motifs, of EAAAK (SEQ ID NO: 329). In some embodiments, a linker can contain motifs, e.g., multiple or repeating motifs, of praline-rich sequences such as (XP)n, in which X may be any amino acid (e.g., A, K, or E) and n is from 1-5, and PAPAP(SEQ ID NO: 330).

[0411] The length of the peptide linker and the amino acids used can be adjusted depending on the two proteins involved and the degree of flexibility desired in the final protein fusion polypeptide. The length of the linker can be adjusted to ensure proper protein folding and avoid aggregate formation.

### 4. Nucleic Acids Encoding ActRIIB Polypeptides

[0412] In certain aspects, the disclosure provides isolated and/or recombinant nucleic acids encoding any of the variant ActRIIB polypeptides (e.g., soluble ActRIIB polypeptides), including any of the variants disclosed herein. For example, SEQ ID NO: 4 encodes a naturally occurring ActRIIB precursor polypeptide, while SEQ ID NO: 3 encodes a soluble ActRIIB polypeptide. The subject nucleic acids may be single-stranded or double stranded. Such nucleic acids may be DNA or RNA molecules. These nucleic acids are may be used, for example, in methods for making ActRIIB polypeptides or as direct therapeutic agents (e.g., in a gene therapy approach).

[0413] In certain aspects, the disclosure relates to isolated and/or recombinant nucleic acids comprising a coding sequence for one or more of the variant ActRIIB polypeptide(s) as described herein. For example, in some embodiments, the disclosure relates to an isolated and/or recombinant nucleic acid that is at least 75%, 80%, 85%, 90%, 91%, 92%, 93%, 94%, 95%, 96%, 97%, 98%, 99%, or 100% identical to the nucleic acid sequence corresponding to any one of SEQ ID Nos: 3, 4, 10, 32, 35, 38, 41, 44, 47, 277, 331, 334, 337, 340, 343, 346, 349, 352, 355, 367, 370, 373, 376, 379, 382, 385, 388, 391, 394, 397, 400, 403, 406, 409, 412, 415, 418, 421, 424, 427, 430, 433, 436, 439, 442, 445, 448, 451, 454, 457, 460, 463, 466,469,472,475,478,481,484,487,490,493,496,499, 502, 505, 508, 511, 514, 517, 521, and 523. In some embodiments, an isolated and/or recombinant polynucleotide sequence of the disclosure comprises a promoter sequence operably linked to a coding sequence described herein (e.g., a nucleic acid that is at least 75%, 80%, 85%, 90%, 91%, 92%, 93%, 94%, 95%, 96%, 97%, 98%, 99%, or 100% identical to the nucleic acid sequence corresponding to any one of SEQ ID Nos: 3, 4, 10, 32, 35, 38, 41, 44, 47, 277, 331, 334, 337, 340, 343, 346, 349, 352, 355, 367, 370, 373, 376, 379, 382, 385, 388, 391, 394, 397, 400, 403, 406, 409, 412, 415, 418, 421, 424, 427, 430, 433, 436, 439, 442, 445, 448, 451, 454, 457,460,463,466,469,472,475,478,481,484,487,490,493,496,499,502,505,508, 511, 514, 517, 521, and 523). In some embodiments, the disclosure relates to vectors comprising an isolated and/or recombinant nucleic acid described herein (e.g., a nucleic acid that is at least 75%, 80%, 85%, 90%, 91%, 92%, 93%, 94%, 95%, 96%, 97%, 98%, 99%, or 100% identical to the nucleic acid sequence corresponding to any one of SEQ ID Nos: 3, 4, 10,32,35,38,41,44,47,277,331,334,337,340,343,346,349,352,355,367,370,373, 376,379,382,385,388,391,394,397,400,403,406,409,412,415,418,421,424,427, 430,433,436,439,442,445,448,451,454,457,460,463,466,469,472,475,478,481, 484, 487, 490, 493, 496, 499, 502, 505, 508, 511, 514, 517, 521, and 523). In some embodiments, the disclosure relates to a cell comprising an isolated and/or recombinant polynucleotide sequence described herein (e.g., a nucleic acid that is at least 75%, 80%, 85%, 90%, 91%, 92%, 93%, 94%, 95%, 96%, 97%, 98%, 99%, or 100% identical to the nucleic acid sequence corresponding to any one of SEQ ID Nos: 3, 4, 10, 32, 35, 38, 41, 44, 47, 277, 331, 334, 337, 340, 343, 346, 349, 352, 355, 367, 370, 373, 376, 379, 382, 385, 388, 391, 394, 397, 400, 403, 406, 409, 412, 415, 418, 421, 424, 427, 430, 433, 436, 439, 442, 445,448,451,454,457,460,463,466,469,472,475,478,481,484,487,490,493,496, 499, 502, 505, 508, 511, 514, 517, 521, and 523). In some embodiments, the cell is a CHO cell. In some embodiments, the cell is a COS cell.

[0414] In certain embodiments, nucleic acids encoding variant ActRIIB (or homomultimers or heteromultimers thereof), ALK4 or ALK7 polypeptides of the disclosure are understood to include nucleic acids that are variants of any one of SEQ ID NOs: 3, 4, 10, 32, 35, 38, 41, 44, 47, 221, 222, 223, 224, 233, 234, 235, 236, 237, 238, 239, 240, 255, 277, 331, 334, 337, 340, 343,346,349,352,355,367,370,373,376,379,382,385,388,391,394,397,400,403, 406,409,412,415,418,421,424,427,430,433,436,439,442,445,448,451,454,457, 460,463,466,469,472,475,478,481,484,487,490,493,496,499,502,505,508,511, 514, 517, 521, and 523. Variant nucleotide sequences include sequences that differ by one or more nucleotide substitutions, additions, or deletions including allelic variants, and therefore, will include coding sequence that differ from the nucleotide sequence designated in any one of SEQ ID NOs: 3, 4, 10, 32, 35, 38, 41, 44, 47, 221, 222, 223, 224, 233, 234, 235, 236, 237, 238, 239, 240, 255, 277, 331, 334, 337, 340, 343, 346, 349, 352, 355, 367, 370, 373, 376, 379,382,385,388,391,394,397,400,403,406,409,412,415,418,421,424,427,430, 433,436,439,442,445,448,451,454,457,460,463,466,469,472,475,478,481,484, 487, 490, 493, 496, 499, 502, 505, 508, 511, 514, 517, 521, and 523.

[0415] In certain embodiments, variant ActRIIB (or homomultimers or heteromultimers thereof), ALK4, or ALK7 polypeptides of the disclosure are encoded by isolated and/or recombinant nucleic acid sequences that are at least 70%, 75%, 80%, 85%, 90%, 91%, 92%, 93%, 94%, 95%, 96%, 97%, 98%, 99%, or 100% identical to any one of SEQ ID NOs: 3, 4, 10,32,35,38,41,44,47,221,222,223,224,233,234,235,236,237,238,239,240,255, 277,331,334,337,340,343,346,349,352,355,367,370,373,376,379,382,385,388, 391,394,397,400,403,406,409,412,415,418,421,424,427,430,433,436,439,442, 445,448,451,454,457,460,463,466,469,472,475,478,481,484,487,490,493,496, 499, 502, 505, 508, 511, 514, 517, 521, and 523. In certain embodiments, variant ActRIIB polypeptides (or homomultimers or heteromultimers thereof) of the disclosure are encoded by isolated and/or recombinant nucleic acid sequences that are at least 70%, 75%, 80%, 85%, 90%, 91%, 92%, 93%, 94%, 95%, 96%, 97%, 98%, 99%, or 100% identical to SEQ ID NO: 3. In certain embodiments, variant ActRIIB polypeptides (or homomultimers or heteromultimers thereof) of the disclosure are encoded by isolated and/or recombinant nucleic acid sequences that are at least 70%, 75%, 80%, 85%, 90%, 91%, 92%, 93%, 94%, 95%, 96%, 97%, 98%, 99%, or 100% identical to SEQ ID NO: 4. In certain embodiments, variant ActRIIB polypeptides (or homomultimers or heteromultimers thereof) of the disclosure are encoded by isolated and/or recombinant nucleic acid sequences that are at least 70%, 75%, 80%, 85%, 90%, 91%, 92%, 93%, 94%, 95%, 96%, 97%, 98%, 99%, or 100% identical to SEQ ID NO: 10. In certain embodiments, variant ActRIIB polypeptides (or homomultimers or heteromultimers thereof) of the disclosure are encoded by isolated and/or recombinant nucleic acid sequences that are at least 70%, 75%, 80%, 85%, 90%, 91%, 92%, 93%, 94%, 95%, 96%, 97%, 98%, 99%, or 100% identical to SEQ ID NO: 32. In certain embodiments, variant ActRIIB polypeptides (or homomultimers or heteromultimers thereof) of the disclosure are encoded by isolated and/or recombinant nucleic acid sequences that are at least 70%, 75%, 80%, 85%, 90%, 91%, 92%, 93%, 94%, 95%, 96%, 97%, 98%, 99%, or 100% identical to SEQ ID NO: 35. In certain embodiments, variant ActRIIB polypeptides (or homomultimers or heteromultimers thereof) of the disclosure are encoded by isolated and/or recombinant nucleic acid sequences that are at least 70%, 75%, 80%, 85%, 90%, 91%, 92%, 93%, 94%, 95%, 96%, 97%, 98%, 99%, or 100% identical to SEQ ID NO: 38. In certain embodiments, variant ActRIIB polypeptides (or homomultimers or heteromultimers thereof) of the disclosure are encoded by isolated and/or recombinant nucleic acid sequences that are at least 70%, 75%, 80%, 85%, 90%, 91%, 92%, 93%, 94%, 95%, 96%, 97%, 98%, 99%, or 100% identical to SEQ ID NO: 41. In certain embodiments, variant ActRIIB polypeptides (or homomultimers or heteromultimers thereof) of the disclosure are encoded by isolated and/or recombinant nucleic acid sequences that are at least 70%, 75%, 80%, 85%, 90%, 91%, 92%, 93%, 94%, 95%, 96%, 97%, 98%, 99%, or 100% identical to SEQ ID NO: 44. In certain embodiments, variant ActRIIB polypeptides (or homomultimers or heteromultimers thereof) of the disclosure are encoded by isolated and/or recombinant nucleic acid sequences that are at least 70%, 75%, 80%, 85%, 90%, 91%, 92%, 93%, 94%, 95%, 96%, 97%, 98%, 99%, or 100% identical to SEQ ID NO: 47. In certain embodiments, variant ActRIIB polypeptides (or homomultimers or heteromultimers thereof) of the disclosure are encoded by isolated and/or recombinant nucleic acid sequences that are at least 70%, 75%, 80%, 85%, 90%, 91%, 92%, 93%, 94%, 95%, 96%, 97%, 98%, 99%, or 100% identical to SEQ ID NO: 277. In certain embodiments, variant ActRIIB polypeptides (or homomultimers or heteromultimers thereof) of the disclosure are encoded by isolated and/or recombinant nucleic acid sequences that are at least 70%, 75%, 80%, 85%, 90%, 91%, 92%, 93%, 94%, 95%, 96%, 97%, 98%, 99%, or 100% identical to SEQ ID NO: 331. In certain embodiments, variant ActRIIB polypeptides (or homomultimers or heteromultimers thereof) of the disclosure are encoded by isolated and/or recombinant nucleic acid sequences that are at least 70%, 75%, 80%, 85%, 90%, 91%, 92%, 93%, 94%, 95%, 96%, 97%, 98%, 99%, or 100% identical to SEQ ID NO: 334. In certain embodiments, variant ActRIIB polypeptides (or homomultimers or heteromultimers thereof) of the disclosure are encoded by isolated and/or recombinant nucleic acid sequences that are at least 70%, 75%, 80%, 85%, 90%, 91%, 92%, 93%, 94%, 95%, 96%, 97%, 98%, 99%, or 100% identical to SEQ ID NO: 337. In certain embodiments, variant ActRIIB polypeptides (or homomultimers or heteromultimers thereof) of the disclosure are encoded by isolated and/or recombinant nucleic acid sequences that are at least 70%, 75%, 80%, 85%, 90%, 91%, 92%, 93%, 94%, 95%, 96%, 97%, 98%, 99%, or 100% identical to SEQ ID NO: 340. In certain embodiments, variant ActRIIB polypeptides (or homomultimers or heteromultimers thereof) of the disclosure are encoded by isolated and/or recombinant nucleic acid sequences that are at least 70%, 75%, 80%, 85%, 90%, 91%, 92%, 93%, 94%, 95%, 96%, 97%, 98%, 99%, or 100% identical to SEQ ID NO: 343. In certain embodiments, variant ActRIIB polypeptides (or homomultimers or heteromultimers thereof) of the disclosure are encoded by isolated and/or recombinant nucleic acid sequences that are at least 70%, 75%, 80%, 85%, 90%, 91%, 92%, 93%, 94%, 95%, 96%, 97%, 98%, 99%, or 100% identical to SEQ ID NO: 346. In certain embodiments, variant ActRIIB polypeptides (or homomultimers or heteromultimers thereof) of the disclosure are encoded by isolated and/or recombinant nucleic acid sequences that are at least 70%, 75%, 80%, 85%, 90%, 91%, 92%, 93%, 94%, 95%, 96%, 97%, 98%, 99%, or 100% identical to SEQ ID NO: 349. In certain embodiments, variant ActRIIB polypeptides (or homomultimers or heteromultimers thereof) of the disclosure are encoded by isolated and/or recombinant nucleic acid sequences that are at least 70%, 75%, 80%, 85%, 90%, 91%, 92%, 93%, 94%, 95%, 96%, 97%, 98%, 99%, or 100% identical to SEQ ID NO: 352. In certain embodiments, variant ActRIIB polypeptides (or homomultimers or heteromultimers thereof) of the disclosure are encoded by isolated and/or recombinant nucleic acid sequences that are at least 70%, 75%, 80%, 85%, 90%, 91%, 92%, 93%, 94%, 95%, 96%, 97%, 98%, 99%, or 100% identical to SEQ ID NO: 355. In certain embodiments, variant ActRIIB polypeptides (or homomultimers or heteromultimers thereof) of the disclosure are encoded by isolated and/or recombinant nucleic acid sequences that are at least 70%, 75%, 80%, 85%, 90%, 91%, 92%, 93%, 94%, 95%, 96%, 97%, 98%, 99%, or 100% identical to SEQ ID NO: 367. In certain embodiments, variant ActRIIB polypeptides (or homomultimers or heteromultimers thereof) of the disclosure are encoded by isolated and/or recombinant nucleic acid sequences that are at least 70%, 75%, 80%, 85%, 90%, 91%, 92%, 93%, 94%, 95%, 96%, 97%, 98%, 99%, or 100% identical to SEQ ID NO: 370. In certain embodiments, variant ActRIIB polypeptides (or homomultimers or heteromultimers thereof) of the disclosure are encoded by isolated and/or recombinant nucleic acid sequences that are at least 70%, 75%, 80%, 85%, 90%, 91%, 92%, 93%, 94%, 95%, 96%, 97%, 98%, 99%, or 100% identical to SEQ ID NO: 373. In certain embodiments, variant ActRIIB polypeptides (or homomultimers or heteromultimers thereof) of the disclosure are encoded by isolated and/or recombinant nucleic acid sequences that are at least 70%, 75%, 80%, 85%, 90%, 91%, 92%, 93%, 94%, 95%, 96%, 97%, 98%, 99%, or 100% identical to SEQ ID NO: 376. In certain embodiments, variant ActRIIB polypeptides (or homomultimers or heteromultimers thereof) of the disclosure are encoded by isolated and/or recombinant nucleic acid sequences that are at least 70%, 75%, 80%, 85%, 90%, 91%, 92%, 93%, 94%, 95%, 96%, 97%, 98%, 99%, or 100% identical to SEQ ID NO: 379. In certain embodiments, variant ActRIIB polypeptides (or homomultimers or heteromultimers thereof) of the disclosure are encoded by isolated and/or recombinant nucleic acid sequences that are at least 70%, 75%, 80%, 85%, 90%, 91%, 92%, 93%, 94%, 95%, 96%, 97%, 98%, 99%, or 100% identical to SEQ ID NO: 382. In certain embodiments, variant ActRIIB polypeptides (or homomultimers or heteromultimers thereof) of the disclosure are encoded by isolated and/or recombinant nucleic acid sequences that are at least 70%, 75%, 80%, 85%, 90%, 91%, 92%, 93%, 94%, 95%, 96%, 97%, 98%, 99%, or 100% identical to SEQ ID NO: 385. In certain embodiments, variant ActRIIB polypeptides (or homomultimers or heteromultimers thereof) of the disclosure are encoded by isolated and/or recombinant nucleic acid sequences that are at least 70%, 75%, 80%, 85%, 90%, 91%, 92%, 93%, 94%, 95%, 96%, 97%, 98%, 99%, or 100% identical to SEQ ID NO: 388. In certain embodiments, variant ActRIIB polypeptides (or homomultimers or heteromultimers thereof) of the disclosure are encoded by isolated and/or recombinant nucleic acid sequences that are at least 70%, 75%, 80%, 85%, 90%, 91%, 92%, 93%, 94%, 95%, 96%, 97%, 98%, 99%, or 100% identical to SEQ ID NO: 391. In certain embodiments, variant ActRIIB polypeptides (or homomultimers or heteromultimers thereof) of the disclosure are encoded by isolated and/or recombinant nucleic acid sequences that are at least 70%, 75%, 80%, 85%, 90%, 91%, 92%, 93%, 94%, 95%, 96%, 97%, 98%, 99%, or 100% identical to SEQ ID NO: 394. In certain embodiments, variant ActRIIB polypeptides (or homomultimers or heteromultimers thereof) of the disclosure are encoded by isolated and/or recombinant nucleic acid sequences that are at least 70%, 75%, 80%, 85%, 90%, 91%, 92%, 93%, 94%, 95%, 96%, 97%, 98%, 99%, or 100% identical to SEQ ID NO: 397. In certain embodiments, variant ActRIIB polypeptides (or homomultimers or heteromultimers thereof) of the disclosure are encoded by isolated and/or recombinant nucleic acid sequences that are at least 70%, 75%, 80%, 85%, 90%, 91%, 92%, 93%, 94%, 95%, 96%, 97%, 98%, 99%, or 100% identical to SEQ ID NO: 400. In certain embodiments, variant ActRIIB polypeptides (or homomultimers or heteromultimers thereof) of the disclosure are encoded by isolated and/or recombinant nucleic acid sequences that are at least 70%, 75%, 80%, 85%, 90%, 91%, 92%, 93%, 94%, 95%, 96%, 97%, 98%, 99%, or 100% identical to SEQ ID NO: 403. In certain embodiments, variant ActRIIB polypeptides (or homomultimers or heteromultimers thereof) of the disclosure are encoded by isolated and/or recombinant nucleic acid sequences that are at least 70%, 75%, 80%, 85%, 90%, 91%, 92%, 93%, 94%, 95%, 96%, 97%, 98%, 99%, or 100% identical to SEQ ID NO: 406. In certain embodiments, variant ActRIIB polypeptides (or homomultimers or heteromultimers thereof) of the disclosure are encoded by isolated and/or recombinant nucleic acid sequences that are at least 70%, 75%, 80%, 85%, 90%, 91%, 92%, 93%, 94%, 95%, 96%, 97%, 98%, 99%, or 100% identical to SEQ ID NO: 409. In certain embodiments, variant ActRIIB polypeptides (or homomultimers or heteromultimers thereof) of the disclosure are encoded by isolated and/or recombinant nucleic acid sequences that are at least 70%, 75%, 80%, 85%, 90%, 91%, 92%, 93%, 94%, 95%, 96%, 97%, 98%, 99%, or 100% identical to SEQ ID NO: 412. In certain embodiments, variant ActRIIB polypeptides (or homomultimers or heteromultimers thereof) of the disclosure are encoded by isolated and/or recombinant nucleic acid sequences that are at least 70%, 75%, 80%, 85%, 90%, 91%, 92%, 93%, 94%, 95%, 96%, 97%, 98%, 99%, or 100% identical to SEQ ID NO: 415. In certain embodiments, variant ActRIIB polypeptides (or homomultimers or heteromultimers thereof) of the disclosure are encoded by isolated and/or recombinant nucleic acid sequences that are at least 70%, 75%, 80%, 85%, 90%, 91%, 92%, 93%, 94%, 95%, 96%, 97%, 98%, 99%, or 100% identical to SEQ ID NO: 418. In certain embodiments, variant ActRIIB polypeptides (or homomultimers or heteromultimers thereof) of the disclosure are encoded by isolated and/or recombinant nucleic acid sequences that are at least 70%, 75%, 80%, 85%, 90%, 91%, 92%, 93%, 94%, 95%, 96%, 97%, 98%, 99%, or 100% identical to SEQ ID NO: 421. In certain embodiments, variant ActRIIB polypeptides (or homomultimers or heteromultimers thereof) of the disclosure are encoded by isolated and/or recombinant nucleic acid sequences that are at least 70%, 75%, 80%, 85%, 90%, 91%, 92%, 93%, 94%, 95%, 96%, 97%, 98%, 99%, or 100% identical to SEQ ID NO: 424. In certain embodiments, variant ActRIIB polypeptides (or homomultimers or heteromultimers thereof) of the disclosure are encoded by isolated and/or recombinant nucleic acid sequences that are at least 70%, 75%, 80%, 85%, 90%, 91%, 92%, 93%, 94%, 95%, 96%, 97%, 98%, 99%, or 100% identical to SEQ ID NO: 427. In certain embodiments, variant ActRIIB polypeptides (or homomultimers or heteromultimers thereof) of the disclosure are encoded by isolated and/or recombinant nucleic acid sequences that are at least 70%, 75%, 80%, 85%, 90%, 91%, 92%, 93%, 94%, 95%, 96%, 97%, 98%, 99%, or 100% identical to SEQ ID NO: 430. In certain embodiments, variant ActRIIB polypeptides (or homomultimers or heteromultimers thereof) of the disclosure are encoded by isolated and/or recombinant nucleic acid sequences that are at least 70%, 75%, 80%, 85%, 90%, 91%, 92%, 93%, 94%, 95%, 96%, 97%, 98%, 99%, or 100% identical to SEQ ID NO: 433. In certain embodiments, variant ActRIIB polypeptides (or homomultimers or heteromultimers thereof) of the disclosure are encoded by isolated and/or recombinant nucleic acid sequences that are at least 70%, 75%, 80%, 85%, 90%, 91%, 92%, 93%, 94%, 95%, 96%, 97%, 98%, 99%, or 100% identical to SEQ ID NO: 436. In certain embodiments, variant ActRIIB polypeptides (or homomultimers or heteromultimers thereof) of the disclosure are encoded by isolated and/or recombinant nucleic acid sequences that are at least 70%, 75%, 80%, 85%, 90%, 91%, 92%, 93%, 94%, 95%, 96%, 97%, 98%, 99%, or 100% identical to SEQ ID NO: 439. In certain embodiments, variant ActRIIB polypeptides (or homomultimers or heteromultimers thereof) of the disclosure are encoded by isolated and/or recombinant nucleic acid sequences that are at least 70%, 75%, 80%, 85%, 90%, 91%, 92%, 93%, 94%, 95%, 96%, 97%, 98%, 99%, or 100% identical to SEQ ID NO: 442. In certain embodiments, variant ActRIIB polypeptides (or homomultimers or heteromultimers thereof) of the disclosure are encoded by isolated and/or recombinant nucleic acid sequences that are at least 70%, 75%, 80%, 85%, 90%, 91%, 92%, 93%, 94%, 95%, 96%, 97%, 98%, 99%, or 100% identical to SEQ ID NO: 445. In certain embodiments, variant ActRIIB polypeptides (or homomultimers or heteromultimers thereof) of the disclosure are encoded by isolated and/or recombinant nucleic acid sequences that are at least 70%, 75%, 80%, 85%, 90%, 91%, 92%, 93%, 94%, 95%, 96%, 97%, 98%, 99%, or 100% identical to SEQ ID NO: 448. In certain embodiments, variant ActRIIB polypeptides (or homomultimers or heteromultimers thereof) of the disclosure are encoded by isolated and/or recombinant nucleic acid sequences that are at least 70%, 75%, 80%, 85%, 90%, 91%, 92%, 93%, 94%, 95%, 96%, 97%, 98%, 99%, or 100% identical to SEQ ID NO: 451. In certain embodiments, variant ActRIIB polypeptides (or homomultimers or heteromultimers thereof) of the disclosure are encoded by isolated and/or recombinant nucleic acid sequences that are at least 70%, 75%, 80%, 85%, 90%, 91%, 92%, 93%, 94%, 95%, 96%, 97%, 98%, 99%, or 100% identical to SEQ ID NO: 454. In certain embodiments, variant ActRIIB polypeptides (or homomultimers or heteromultimers thereof) of the disclosure are encoded by isolated and/or recombinant nucleic acid sequences that are at least 70%, 75%, 80%, 85%, 90%, 91%, 92%, 93%, 94%, 95%, 96%, 97%, 98%, 99%, or 100% identical to SEQ ID NO: 457. In certain embodiments, variant ActRIIB polypeptides (or homomultimers or heteromultimers thereof) of the disclosure are encoded by isolated and/or recombinant nucleic acid sequences that are at least 70%, 75%, 80%, 85%, 90%, 91%, 92%, 93%, 94%, 95%, 96%, 97%, 98%, 99%, or 100% identical to SEQ ID NO: 460. In certain embodiments, variant ActRIIB polypeptides (or homomultimers or heteromultimers thereof) of the disclosure are encoded by isolated and/or recombinant nucleic acid sequences that are at least 70%, 75%, 80%, 85%, 90%, 91%, 92%, 93%, 94%, 95%, 96%, 97%, 98%, 99%, or 100% identical to SEQ ID NO: 463. In certain embodiments, variant ActRIIB polypeptides (or homomultimers or heteromultimers thereof) of the disclosure are encoded by isolated and/or recombinant nucleic acid sequences that are at least 70%, 75%, 80%, 85%, 90%, 91%, 92%, 93%, 94%, 95%, 96%, 97%, 98%, 99%, or 100% identical to SEQ ID NO: 466. In certain embodiments, variant ActRIIB polypeptides (or homomultimers or heteromultimers thereof) of the disclosure are encoded by isolated and/or recombinant nucleic acid sequences that are at least 70%, 75%, 80%, 85%, 90%, 91%, 92%, 93%, 94%, 95%, 96%, 97%, 98%, 99%, or 100% identical to SEQ ID NO: 469. In certain embodiments, variant ActRIIB polypeptides (or homomultimers or heteromultimers thereof) of the disclosure are encoded by isolated and/or recombinant nucleic acid sequences that are at least 70%, 75%, 80%, 85%, 90%, 91%, 92%, 93%, 94%, 95%, 96%, 97%, 98%, 99%, or 100% identical to SEQ ID NO: 472. In certain embodiments, variant ActRIIB polypeptides (or homomultimers or heteromultimers thereof) of the disclosure are encoded by isolated and/or recombinant nucleic acid sequences that are at least 70%, 75%, 80%, 85%, 90%, 91%, 92%, 93%, 94%, 95%, 96%, 97%, 98%, 99%, or 100% identical to SEQ ID NO: 475. In certain embodiments, variant ActRIIB polypeptides (or homomultimers or heteromultimers thereof) of the disclosure are encoded by isolated and/or recombinant nucleic acid sequences that are at least 70%, 75%, 80%, 85%, 90%, 91%, 92%, 93%, 94%, 95%, 96%, 97%, 98%, 99%, or 100% identical to SEQ ID NO: 478. In certain embodiments, variant ActRIIB polypeptides (or homomultimers or heteromultimers thereof) of the disclosure are encoded by isolated and/or recombinant nucleic acid sequences that are at least 70%, 75%, 80%, 85%, 90%, 91%, 92%, 93%, 94%, 95%, 96%, 97%, 98%, 99%, or 100% identical to SEQ ID NO: 481. In certain embodiments, variant ActRIIB polypeptides (or homomultimers or heteromultimers thereof) of the disclosure are encoded by isolated and/or recombinant nucleic acid sequences that are at least 70%, 75%, 80%, 85%, 90%, 91%, 92%, 93%, 94%, 95%, 96%, 97%, 98%, 99%, or 100% identical to SEQ ID NO: 484. In certain embodiments, variant ActRIIB polypeptides (or homomultimers or heteromultimers thereof) of the disclosure are encoded by isolated and/or recombinant nucleic acid sequences that are at least 70%, 75%, 80%, 85%, 90%, 91%, 92%, 93%, 94%, 95%, 96%, 97%, 98%, 99%, or 100% identical to SEQ ID NO: 487. In certain embodiments, variant ActRIIB polypeptides (or homomultimers or heteromultimers thereof) of the disclosure are encoded by isolated and/or recombinant nucleic acid sequences that are at least 70%, 75%, 80%, 85%, 90%, 91%, 92%, 93%, 94%, 95%, 96%, 97%, 98%, 99%, or 100% identical to SEQ ID NO: 490. In certain embodiments, variant ActRIIB polypeptides (or homomultimers or heteromultimers thereof) of the disclosure are encoded by isolated and/or recombinant nucleic acid sequences that are at least 70%, 75%, 80%, 85%, 90%, 91%, 92%, 93%, 94%, 95%, 96%, 97%, 98%, 99%, or 100% identical to SEQ ID NO: 493. In certain embodiments, variant ActRIIB polypeptides (or homomultimers or heteromultimers thereof) of the disclosure are encoded by isolated and/or recombinant nucleic acid sequences that are at least 70%, 75%, 80%, 85%, 90%, 91%, 92%, 93%, 94%, 95%, 96%, 97%, 98%, 99%, or 100% identical to SEQ ID NO: 496. In certain embodiments, variant ActRIIB polypeptides (or homomultimers or heteromultimers thereof) of the disclosure are encoded by isolated and/or recombinant nucleic acid sequences that are at least 70%, 75%, 80%, 85%, 90%, 91%, 92%, 93%, 94%, 95%, 96%, 97%, 98%, 99%, or 100% identical to SEQ ID NO: 499. In certain embodiments, variant ActRIIB polypeptides (or homomultimers or heteromultimers thereof) of the disclosure are encoded by isolated and/or recombinant nucleic acid sequences that are at least 70%, 75%, 80%, 85%, 90%, 91%, 92%, 93%, 94%, 95%, 96%, 97%, 98%, 99%, or 100% identical to SEQ ID NO: 502. In certain embodiments, variant ActRIIB polypeptides (or homomultimers or heteromultimers thereof) of the disclosure are encoded by isolated and/or recombinant nucleic acid sequences that are at least 70%, 75%, 80%, 85%, 90%, 91%, 92%, 93%, 94%, 95%, 96%, 97%, 98%, 99%, or 100% identical to SEQ ID NO: 505. In certain embodiments, variant ActRIIB polypeptides (or homomultimers or heteromultimers thereof) of the disclosure are encoded by isolated and/or recombinant nucleic acid sequences that are at least 70%, 75%, 80%, 85%, 90%, 91%, 92%, 93%, 94%, 95%, 96%, 97%, 98%, 99%, or 100% identical to SEQ ID NO: 508. In certain embodiments, variant ActRIIB polypeptides (or homomultimers or heteromultimers thereof) of the disclosure are encoded by isolated and/or recombinant nucleic acid sequences that are at least 70%, 75%, 80%, 85%, 90%, 91%, 92%, 93%, 94%, 95%, 96%, 97%, 98%, 99%, or 100% identical to SEQ ID NO: 511. In certain embodiments, variant ActRIIB polypeptides (or homomultimers or heteromultimers thereof) of the disclosure are encoded by isolated and/or recombinant nucleic acid sequences that are at least 70%, 75%, 80%, 85%, 90%, 91%, 92%, 93%, 94%, 95%, 96%, 97%, 98%, 99%, or 100% identical to SEQ ID NO: 514. In certain embodiments, variant ActRIIB polypeptides (or homomultimers or heteromultimers thereof) of the disclosure are encoded by isolated and/or recombinant nucleic acid sequences that are at least 70%, 75%, 80%, 85%, 90%, 91%, 92%, 93%, 94%, 95%, 96%, 97%, 98%, 99%, or 100% identical to SEQ ID NO: 517. In certain embodiments, variant ActRIIB polypeptides (or homomultimers or heteromultimers thereof) of the disclosure are encoded by isolated and/or recombinant nucleic acid sequences that are at least 70%, 75%, 80%, 85%, 90%, 91%, 92%, 93%, 94%, 95%, 96%, 97%, 98%, 99%, or 100% identical to SEQ ID NO: 521. In certain embodiments, variant ActRIIB polypeptides (or homomultimers or heteromultimers thereof) of the disclosure are encoded by isolated and/or recombinant nucleic acid sequences that are at least 70%, 75%, 80%, 85%, 90%, 91%, 92%, 93%, 94%, 95%, 96%, 97%, 98%, 99%, or 100% identical to SEQ ID NO: 523.

[0416] In certain embodiments, ALK4 polypeptides of the disclosure are encoded by isolated and/or recombinant nucleic acid sequences that are at least 70%, 75%, 80%, 85%, 90%, 91%, 92%, 93%, 94%, 95%, 96%, 97%, 98%, 99%, or 100% identical to SEQ ID NO: 221. In certain embodiments, ALK4 polypeptides of the disclosure are encoded by isolated and/or recombinant nucleic acid sequences that are at least 70%, 75%, 80%, 85%, 90%, 91%, 92%, 93%, 94%, 95%, 96%, 97%, 98%, 99%, or 100% identical to SEQ ID NO: 222. In certain embodiments, ALK4 polypeptides of the disclosure are encoded by isolated and/or recombinant nucleic acid sequences that are at least 70%, 75%, 80%, 85%, 90%, 91%, 92%, 93%, 94%, 95%, 96%, 97%, 98%, 99%, or 100% identical to SEQ ID NO: 223. In certain embodiments, ALK4 polypeptides of the disclosure are encoded by isolated and/or recombinant nucleic acid sequences that are at least 70%, 75%, 80%, 85%, 90%, 91%, 92%, 93%, 94%, 95%, 96%, 97%, 98%, 99%, or 100% identical to SEQ ID NO: 224.

[0417] In certain embodiments, ALK7 polypeptides of the disclosure are encoded by isolated and/or recombinant nucleic acid sequences that are at least 70%, 75%, 80%, 85%, 90%, 91%, 92%, 93%, 94%, 95%, 96%, 97%, 98%, 99%, or 100% identical to SEQ ID NO: 233. In certain embodiments, ALK7 polypeptides of the disclosure are encoded by isolated and/or recombinant nucleic acid sequences that are at least 70%, 75%, 80%, 85%, 90%, 91%, 92%, 93%, 94%, 95%, 96%, 97%, 98%, 99%, or 100% identical to SEQ ID NO: 234. In certain embodiments, ALK7 polypeptides of the disclosure are encoded by isolated and/or recombinant nucleic acid sequences that are at least 70%, 75%, 80%, 85%, 90%, 91%, 92%, 93%, 94%, 95%, 96%, 97%, 98%, 99%, or 100% identical to SEQ ID NO: 235. In certain embodiments, ALK7 polypeptides of the disclosure are encoded by isolated and/or recombinant nucleic acid sequences that are at least 70%, 75%, 80%, 85%, 90%, 91%, 92%, 93%, 94%, 95%, 96%, 97%, 98%, 99%, or 100% identical to SEQ ID NO: 236. In certain embodiments, ALK7 polypeptides of the disclosure are encoded by isolated and/or recombinant nucleic acid sequences that are at least 70%, 75%, 80%, 85%, 90%, 91%, 92%, 93%, 94%, 95%, 96%, 97%, 98%, 99%, or 100% identical to SEQ ID NO: 237. In certain embodiments, ALK7 polypeptides of the disclosure are encoded by isolated and/or recombinant nucleic acid sequences that are at least 70%, 75%, 80%, 85%, 90%, 91%, 92%, 93%, 94%, 95%, 96%, 97%, 98%, 99%, or 100% identical to SEQ ID NO: 238. In certain embodiments, ALK7 polypeptides of the disclosure are encoded by isolated and/or recombinant nucleic acid sequences that are at least 70%, 75%, 80%, 85%, 90%, 91%, 92%, 93%, 94%, 95%, 96%, 97%, 98%, 99%, or 100% identical to SEQ ID NO: 239. In certain embodiments, ALK7 polypeptides of the disclosure are encoded by isolated and/or recombinant nucleic acid sequences that are at least 70%, 75%, 80%, 85%, 90%, 91%, 92%, 93%, 94%, 95%, 96%, 97%, 98%, 99%, or 100% identical to SEQ ID NO: 240.

[0418] In certain embodiments, ALK4-Fc fusion polypeptides of the disclosure are encoded by isolated and/or recombinant nucleic acid sequences that are at least 70%, 75%, 80%, 85%, 90%, 91%, 92%, 93%, 94%, 95%, 96%, 97%, 98%, 99%, or 100% identical to SEQ ID NO: 243. In certain embodiments, ALK4-Fc fusion polypeptides of the disclosure are encoded by isolated and/or recombinant nucleic acid sequences that are at least 70%, 75%, 80%, 85%, 90%, 91%, 92%, 93%, 94%, 95%, 96%, 97%, 98%, 99%, or 100% identical to SEQ ID NO: 248. In certain embodiments, ALK4-Fc fusion polypeptides of the disclosure are encoded by isolated and/or recombinant nucleic acid sequences that are at least 70%, 75%, 80%, 85%, 90%, 91%, 92%, 93%, 94%, 95%, 96%, 97%, 98%, 99%, or 100% identical to SEQ ID NO: 250. In certain embodiments, ALK4-Fc fusion polypeptides of the disclosure are encoded by isolated and/or recombinant nucleic acid sequences that are at least 70%, 75%, 80%, 85%, 90%, 91%, 92%, 93%, 94%, 95%, 96%, 97%, 98%, 99%, or 100% identical to SEQ ID NO: 251. In certain embodiments, ALK4-Fc fusion polypeptides of the disclosure are encoded by isolated and/or recombinant nucleic acid sequences that are at least 70%, 75%, 80%, 85%, 90%, 91%, 92%, 93%, 94%, 95%, 96%, 97%, 98%, 99%, or 100% identical to SEQ ID NO: 252. In certain embodiments, ALK7-Fc fusion polypeptides of the disclosure are encoded by isolated and/or recombinant nucleic acid sequences that are at least 70%, 75%, 80%, 85%, 90%, 91%, 92%, 93%, 94%, 95%, 96%, 97%, 98%, 99%, or 100% identical to SEQ ID NO: 255.

[0419] In certain aspects, the subject nucleic acids encoding variant ActRIIB polypeptides are further understood to include nucleic acids that are variants of SEQ ID NO: 3. Variant nucleotide sequences include sequences that differ by one or more nucleotide substitutions, additions or deletions, such as allelic variants; and will, therefore, include coding sequences that differ from the nucleotide sequence of the coding sequence designated in SEQ ID NO: 4.

[0420] In certain embodiments, the disclosure provides isolated or recombinant nucleic acid sequences that are at least 75%, 80%, 85%, 90%, 91%, 92%, 93%, 94%, 95%, 96%, 97%, 98%, 99%, or 100% identical to SEQ ID NO: 3. One of ordinary skill in the art will appreciate that nucleic acid sequences complementary to SEQ ID NO: 3, and variants of SEQ ID NO: 3 are also within the scope of this disclosure. In further embodiments, the nucleic acid sequences of the disclosure can be isolated, recombinant, and/or fused with a heterologous nucleotide sequence, or in a DNA library.

[0421] In other embodiments, nucleic acids of the disclosure also include nucleotide sequences that hybridize under highly stringent conditions to nucleic acids encoding variant ActRIIB proteins in either homomeric or heteromeric forms, ALK4, or ALK7 polypeptides of the disclosure (e.g., SEQ ID NO: 3), the complement sequence, or fragments thereof. As discussed above, one of ordinary skill in the art will understand readily that appropriate stringency conditions which promote DNA hybridization can be varied. One of ordinary skill in the art will understand readily that appropriate stringency conditions which promote DNA hybridization can be varied. For example, one could perform the hybridization at 6.0 x sodium chloride/sodium citrate (SSC) at about 45° C., followed by a wash of 2.0 x SSC at 50° C. For example, the salt concentration in the wash step can be selected from a low stringency of about 2.0 x SSC at 50° C. to a high stringency of about 0.2 x SSC at 50° C. In addition, the temperature in the wash step can be increased from low stringency conditions at room temperature, about 22° C., to high stringency conditions at about 65° C. Both temperature and salt may be varied, or temperature or salt concentration may be held constant while the other variable is changed. In one embodiment, the disclosure provides nucleic acids which hybridize under low stringency conditions of 6 x SSC at room temperature followed by a wash at 2 x SSC at room temperature.

[0422] Isolated nucleic acids which differ from the nucleic acids as set forth in SEQ ID NO: 3 due to degeneracy in the genetic code are also within the scope of the disclosure. For example, a number of amino acids are designated by more than one triplet. Codons that specify the same amino acid, or synonyms (for example, CAU and CAC are synonyms for histidine) may result in “silent” mutations which do not affect the amino acid sequence of the protein. However, it is expected that DNA sequence polymorphisms that do lead to changes in the amino acid sequences of the subject proteins will exist among mammalian cells. One skilled in the art will appreciate that these variations in one or more nucleotides (up to about 3-5% of the nucleotides) of the nucleic acids encoding a particular protein may exist among individuals of a given species due to natural allelic variation. Any and all such nucleotide variations and resulting amino acid polymorphisms are within the scope of this disclosure.

[0423] In certain embodiments, the recombinant nucleic acids of the disclosure may be operably linked to one or more regulatory nucleotide sequences in an expression construct. Regulatory nucleotide sequences will generally be appropriate to the host cell used for expression. Numerous types of appropriate expression vectors and suitable regulatory sequences are known in the art for a variety of host cells. Typically, said one or more regulatory nucleotide sequences may include, but are not limited to, promoter sequences, leader or signal sequences, ribosomal binding sites, transcriptional start and termination sequences, translational start and termination sequences, and enhancer or activator sequences. Constitutive or inducible promoters as known in the art are contemplated by the disclosure. The promoters may be either naturally occurring promoters, or hybrid promoters that combine elements of more than one promoter. An expression construct may be present in a cell on an episome, such as a plasmid, or the expression construct may be inserted in a chromosome. In a preferred embodiment, the expression vector contains a selectable marker gene to allow the selection of transformed host cells. Selectable marker genes are well known in the art and will vary with the host cell used.

[0424] In certain aspects, the subject nucleic acid is provided in an expression vector comprising a nucleotide sequence encoding a variant ActRIIB polypeptide and operably linked to at least one regulatory sequence. Regulatory sequences are art-recognized and are selected to direct expression of the variant ActRIIB polypeptide. Accordingly, the term regulatory sequence includes promoters, enhancers, and other expression control elements. Exemplary regulatory sequences are described in Goeddel; Gene Expression Technology: Methods in Enzymology, Academic Press, San Diego, CA (1990). For instance, any of a wide variety of expression control sequences that control the expression of a DNA sequence when operatively linked to it may be used in these vectors to express DNA sequences encoding a variant ActRIIB polypeptide. Such useful expression control sequences, include, for example, the early and late promoters of SV40, tet promoter, adenovirus or cytomegalovirus immediate early promoter, RSV promoters, the lac system, the trp system, the TAC or TRC system, T7 promoter whose expression is directed by T7 RNA polymerase, the major operator and promoter regions of phage lambda , the control regions for fd coat protein, the promoter for 3-phosphoglycerate kinase or other glycolytic enzymes, the promoters of acid phosphatase, e.g., Pho5, the promoters of the yeast α-mating factors, the polyhedron promoter of the baculovirus system and other sequences known to control the expression of genes of prokaryotic or eukaryotic cells or their viruses, and various combinations thereof. It should be understood that the design of the expression vector may depend on such factors as the choice of the host cell to be transformed and/or the type of protein desired to be expressed. Moreover, the vector’s copy number, the ability to control that copy number and the expression of any other protein encoded by the vector, such as antibiotic markers, should also be considered.

[0425] A recombinant nucleic acid of the disclosure can be produced by ligating the cloned gene, or a portion thereof, into a vector suitable for expression in either prokaryotic cells, eukaryotic cells (yeast, avian, insect or mammalian), or both. Expression vehicles for production of a recombinant variant ActRIIB polypeptide include plasmids and other vectors. For instance, suitable vectors include plasmids of the types: pBR322-derived plasmids, pEMBL-derived plasmids, pEX-derived plasmids, pBTac-derived plasmids and pUC-derived plasmids for expression in prokaryotic cells, such as E. coli.

[0426] Some mammalian expression vectors contain both prokaryotic sequences to facilitate the propagation of the vector in bacteria, and one or more eukaryotic transcription units that are expressed in eukaryotic cells. The pcDNAI/amp, pcDNAI/neo, pRc/CMV, pSV2gpt, pSV2neo, pSV2-dhfr, pTk2, pRSVneo, pMSG, pSVT7, pko-neo and pHyg derived vectors are examples of mammalian expression vectors suitable for transfection of eukaryotic cells. Some of these vectors are modified with sequences from bacterial plasmids, such as pBR322, to facilitate replication and drug resistance selection in both prokaryotic and eukaryotic cells. Alternatively, derivatives of viruses such as the bovine papilloma virus (BPV-1), or Epstein-Barr virus (pHEBo, pREP-derived and p205) can be used for transient expression of proteins in eukaryotic cells. Examples of other viral (including retroviral) expression systems can be found below in the description of gene therapy delivery systems. The various methods employed in the preparation of the plasmids and in transformation of host organisms are well known in the art. For other suitable expression systems for both prokaryotic and eukaryotic cells, as well as general recombinant procedures, see Molecular Cloning A Laboratory Manual, 2nd Ed., ed. by Sambrook, Fritsch and Maniatis (Cold Spring Harbor Laboratory Press, 1989) Chapters 16 and 17. In some instances, it may be desirable to express the recombinant polypeptides by the use of a baculovirus expression system. Examples of such baculovirus expression systems include pVL-derived vectors (such as pVL1392, pVL1393 and pVL941), pAcUW-derived vectors (such as pAcUW1), and pBlueBac-derived vectors (such as the β-gal containing pBlueBac III).

[0427] In a preferred embodiment, a vector will be designed for production of the subject variant ActRIIB polypeptides in CHO cells, such as a Pcmv-Script vector (Stratagene, La Jolla, Calif.), pcDNA4 vectors (Invitrogen, Carlsbad, Calif.) and pCI-neo vectors (Promega, Madison, Wisc.). As will be apparent, the subject gene constructs can be used to cause expression of the subject variant ActRIIB polypeptides in cells propagated in culture, e.g., to produce proteins, including fusion proteins or variant proteins, for purification.

[0428] In certain embodiments, the disclosure relates to methods of making ActRIIB polypeptides, including variant ActRIIB polypeptides as well as homomultimer and heteromultimers comprising the same, as described herein. Such a method may include expressing any of the nucleic acids disclosed herein in a suitable cell (e.g., a CHO cell or COS cell). Such a method may comprise: a) culturing a cell under conditions suitable for expression of the soluble ActRIIB polypeptide, wherein said cell comprise with an ActRIIB polypeptide expression construct. In some embodiments, the method further comprises recovering the expressed ActRIIB polypeptide. ActRIIB polypeptides may be recovered as crude, partially purified or highly purified fractions using any of the well-known techniques for obtaining protein from cell cultures.

[0429] This disclosure also pertains to a host cell transfected with a recombinant gene including a coding sequence (e.g., SEQ ID NO: 4) for one or more of the subject variant ActRIIB polypeptides. The host cell may be any prokaryotic or eukaryotic cell. For example, a variant ActRIIB polypeptide of the disclosure may be expressed in bacterial cells such as E. coli, insect cells (e.g., using a baculovirus expression system), yeast, or mammalian cells. Other suitable host cells are known to those skilled in the art.

[0430] Accordingly, the present disclosure further pertains to methods of producing the subject variant ActRIIB polypeptides. For example, a host cell transfected with an expression vector encoding a variant ActRIIB polypeptide can be cultured under appropriate conditions to allow expression of the ActRIIB polypeptide to occur. The variant ActRIIB polypeptide may be secreted and isolated from a mixture of cells and medium containing the variant ActRIIB polypeptide. Alternatively, the variant ActRIIB polypeptide may be retained cytoplasmically or in a membrane fraction and the cells harvested, lysed and the protein isolated. A cell culture includes host cells, media, and other byproducts. Suitable media for cell culture are well known in the art. The subject variant ActRIIB polypeptides can be isolated from cell culture medium, host cells, or both, using techniques known in the art for purifying proteins, including ion-exchange chromatography, gel filtration chromatography, ultrafiltration, electrophoresis, and immunoaffinity purification with antibodies specific for particular epitopes of the variant ActRIIB polypeptides. In a preferred embodiment, the variant ActRIIB polypeptide is a fusion protein containing a domain which facilitates its purification.

[0431] In another embodiment, a fusion gene coding for a purification leader sequence, such as a poly-(His)/enterokinase cleavage site sequence at the N-terminus of the desired portion of the recombinant variant ActRIIB polypeptide, can allow purification of the expressed fusion protein by affinity chromatography using a Ni²⁺ metal resin. The purification leader sequence can then be subsequently removed by treatment with enterokinase to provide the purified variant ActRIIB polypeptide (e.g., see Hochuli et al., (1987) J. Chromatography 411:177; and Janknecht et al., PNAS USA 88:8972).

[0432] Techniques for making fusion genes are well known. Essentially, the joining of various DNA fragments coding for different polypeptide sequences is performed in accordance with conventional techniques, employing blunt-ended or stagger-ended termini for ligation, restriction enzyme digestion to provide for appropriate termini, filling-in of cohesive ends as appropriate, alkaline phosphatase treatment to avoid undesirable joining, and enzymatic ligation. In another embodiment, the fusion gene can be synthesized by conventional techniques including automated DNA synthesizers. Alternatively, PCR amplification of gene fragments can be carried out using anchor primers which give rise to complementary overhangs between two consecutive gene fragments which can subsequently be annealed to generate a chimeric gene sequence (see, for example, Current Protocols in Molecular Biology, eds. Ausubel et al., John Wiley & Sons: 1992).

### 5. Screening Assays

[0433] In certain aspects, the present disclosure relates to the use of the subject variant ActRIIB polypeptides (e.g., variant ActRIIB polypeptides) to identify compounds (agents) which are agonist or antagonists of the variant ActRIIB polypeptides. Compounds identified through this screening can be tested in tissues such as renal, pulmonary, cardiac, bone, cartilage, muscle, fat, and/or neurons, to assess their ability to modulate tissue growth in vitro. Additionally, compounds identified through this screening can be tested for efficacy in treating human or animal disorders or conditions such as pulmonary disorders (e.g., pulmonary hypertension, interstitial lung disease, idiopathic pulmonary fibrosis), renal diseases or conditions (e.g., Alport syndrome, focal segmental glomerulosclerosis (FSGS), polycystic kidney disease, chronic kidney disease), peripheral neuropathy, Charcot-Marie-Tooth disease, and anemia (e.g., anemia associated with myelodysplastic syndrome, thalassemia or myelofibrosis). Optionally, these compounds can further be tested in animal models to assess their ability to modulate tissue growth in vivo.

[0434] There are numerous approaches to screening for therapeutic agents for modulating tissue growth by targeting the variant ActRIIB polypeptides. In certain embodiments, high-throughput screening of compounds can be carried out to identify agents that perturb ActRIIB-mediated effects on growth of renal tissue, pulmonary tissue, cardiac tissue, bone, cartilage, muscle, fat, and/or neurons. In certain embodiments, the assay is carried out to screen and identify compounds that specifically inhibit or reduce binding of a variant ActRIIB polypeptide to its binding partner, such as a ligand of wildtype ActRIIB (e.g., activin A, activin B, GDF8, GDF11, and BMP10). Alternatively, the assay can be used to identify compounds that enhance binding of a variant ActRIIB polypeptide to its binding partner such as an ActRIIB ligand. In a further embodiment, the compounds can be identified by their ability to interact with a variant ActRIIB polypeptide.

[0435] A variety of assay formats will suffice, and, in light of the present disclosure, those not expressly described herein will nevertheless be comprehended by one of ordinary skill in the art. As described herein, the test compounds (agents) of the disclosure may be created by any combinatorial chemical method. Alternatively, the subject compounds may be naturally occurring biomolecules synthesized in vivo or in vitro. Compounds (agents) to be tested for their ability to act as modulators of tissue growth can be produced, for example, by bacteria, yeast, plants, or other organisms (e.g., natural products), produced chemically (e.g., small molecules, including peptidomimetics), or produced recombinantly. Test compounds contemplated by the present disclosure include non-peptidyl organic molecules, peptides, polypeptides, peptidomimetics, sugars, hormones, and nucleic acid molecules. In a specific embodiment, the test agent is a small organic molecule having a molecular weight of less than about 2,000 daltons.

[0436] The test compounds of the disclosure can be provided as single, discrete entities, or provided in libraries of greater complexity, such as made by combinatorial chemistry. These libraries can comprise, for example, alcohols, alkyl halides, amines, amides, esters, aldehydes, ethers, and other classes of organic compounds. Presentation of test compounds to the test system can be in either an isolated form or as mixtures of compounds, especially in initial screening steps. Optionally, the compounds may be optionally derivatized with other compounds and have derivatizing groups that facilitate isolation of the compounds. Non-limiting examples of derivatizing groups include biotin, fluorescein, digoxygenin, green fluorescent protein, isotopes, polyhistidine, magnetic beads, glutathione S transferase (GST), photoactivatable crosslinkers or any combinations thereof.

[0437] In many drug screening programs that test libraries of compounds and natural extracts; high throughput assays are desirable in order to maximize the number of compounds surveyed in a given period of time. Assays which are performed in cell-free systems, such as may be derived with purified or semi-purified proteins, are often preferred as “primary” screens in that they can be generated to permit rapid development and relatively easy detection of an alteration in a molecular target which is mediated by a test compound. Moreover, the effects of cellular toxicity or bioavailability of the test compound can be generally ignored in the in vitro system, the assay instead being focused primarily on the effect of the drug on the molecular target as may be manifest in an alteration of binding affinity between a variant ActRIIB polypeptide and its binding protein (e.g., an ActRIIB ligand).

[0438] Merely to illustrate, in an exemplary screening assay of the present disclosure, the compound of interest is contacted with an isolated and purified ActRIIB polypeptide which is ordinarily capable of binding to an ActRIIB ligand, as appropriate for the intention of the assay. To the mixture of the compound and ActRIIB polypeptide is then added a composition containing an ActRIIB ligand. Detection and quantification of ActRIIB/ActRIIB ligand complexes provides a means for determining the compound’s efficacy at inhibiting (or potentiating) complex formation between the ActRIIB polypeptide and its binding protein. The efficacy of the compound can be assessed by generating dose response curves from data obtained using various concentrations of the test compound. Moreover, a control assay can also be performed to provide a baseline for comparison. For example, in a control assay, isolated and purified ActRIIB ligand is added to a composition containing the ActRIIB polypeptide, and the formation of ActRIIB/ActRIIB ligand complex is quantitated in the absence of the test compound. It will be understood that, in general, the order in which the reactants may be admixed can be varied, and can be admixed simultaneously. Moreover, in place of purified proteins, cellular extracts and lysates may be used to render a suitable cell-free assay system.

[0439] Complex formation between the ActRIIB polypeptide and its binding protein may be detected by a variety of techniques. For instance, modulation of the formation of complexes can be quantitated using, for example, detectably labeled proteins such as radiolabeled (e.g., ³²P, ³⁵S, ¹⁴C or ³H), fluorescently labeled (e.g., FITC), or enzymatically labeled ActRIIB polypeptide or its binding protein, by immunoassay, or by chromatographic detection.

[0440] In certain embodiments, the present disclosure contemplates the use of fluorescence polarization assays and fluorescence resonance energy transfer (FRET) assays in measuring, either directly or indirectly, the degree of interaction between an ActRIIB polypeptide and its binding protein. Further, other modes of detection, such as those based on optical waveguides (PCT Publication WO 96/26432 and U.S. Pat. No. 5,677,196), surface plasmon resonance (SPR), surface charge sensors, and surface force sensors, are compatible with many embodiments described herein.

[0441] Moreover, the present disclosure contemplates the use of an interaction trap assay, also known as the “two hybrid assay,” for identifying agents that disrupt or potentiate interaction between an ActRIIB polypeptide and its binding protein. See for example, U.S. Pat. No. 5,283,317; Zervos et al. (1993) Cell 72:223-232; Madura et al. (1993) J Biol Chem 268:12046-12054; Bartel et al. (1993) Biotechniques 14:920-924; and Iwabuchi et al. (1993) Oncogene 8:1693-1696). In a specific embodiment, the present disclosure contemplates the use of reverse two hybrid systems to identify compounds (e.g., small molecules or peptides) that dissociate interactions between an ActRIIB polypeptide and its binding protein. See for example, Vidal and Legrain, (1999) Nucleic Acids Res 27:919-29; Vidal and Legrain, (1999) Trends Biotechnol 17:374-81; and U.S. Pat. Nos. 5,525,490; 5,955,280; and 5,965,368.

[0442] In certain embodiments, the subject compounds are identified by their ability to interact with a variant ActRIIB polypeptide of the disclosure. The interaction between the compound and the variant ActRIIB polypeptide may be covalent or non-covalent. For example, such interaction can be identified at the protein level using in vitro biochemical methods, including photo-crosslinking, radiolabeled ligand binding, and affinity chromatography (Jakoby WB et al., 1974, Methods in Enzymology 46: 1). In certain cases, the compounds may be screened in a mechanism based assay, such as an assay to detect compounds which bind to a variant ActRIIB polypeptide. This may include a solid phase or fluid phase binding event. Alternatively, the gene encoding a variant ActRIIB polypeptide can be transfected with a reporter system (e.g., β-galactosidase, luciferase, or green fluorescent protein) into a cell and screened against the library preferably by a high throughput screening or with individual members of the library. Other mechanism based binding assays may be used, for example, binding assays which detect changes in free energy. Binding assays can be performed with the target fixed to a well, bead or chip or captured by an immobilized antibody or resolved by capillary electrophoresis. The bound compounds may be detected usually using colorimetric or fluorescence or surface plasmon resonance.

[0443] In certain aspects, the present disclosure provides methods and agents for decreasing pulmonary hypertension and decreasing the pathogenic mechanism contributing to pulmonary hypertension, for example, by antagonizing functions of an ActRIIB polypeptide and/or an ActRIIB ligand. Therefore, any compound (e.g. variant ActRIIB polypeptides) identified can be tested in whole cells or tissues, in vitro or in vivo, to confirm their ability to decrease pulmonary hypertension. Various methods known in the art can be utilized for this purpose. For example, methods of the disclosure are performed such that the signal transduction through an ActRIIB protein activated by binding to an ActRIIB ligand (e.g., activin A, activin B, GDF8, GDF11, or BMP10) has been reduced or inhibited.

[0444] The present disclosure also contemplates in vivo assays to measure the effects of any compound (e.g. variant ActRIIB polypeptides) described herein on pulmonary hypertension. Various animal models of pulmonary hypertension (e.g. pulmonary arterial hypertension) known in the art can be utilized for this purpose. These include animal models such as chronic hypoxia induced pulmonary hypertension (e.g. Sugen Hypoxia model) and monocrotaline induced pulmonary hypertension. The effects of any compound on these animal models can assessed by measuring various parameters such as vessel muscularity, pulmonary artery cross sectional area, right ventricular stroke volume, right ventricular hypertrophy, right ventricular systolic pressure, and survival. These parameters can be assessed, in part, by removing and measuring (e.g. weight and length) the left ventricle (LV), septum (S), and right ventricle (RV) of each animal. Hypertrophy can be assessed, in part, by calculating RV/LV + S. Histopathologic scoring can also be used to measure the vessel muscularity. In some embodiments, methods and agents of the present disclosure can be screened in combination with additional active agents and/or supportive therapies that are currently used in treating pulmonary hypertension (e.g. sildenafil). In some embodiments, methods and agents of the present disclosure can be compared to active agents and/or supportive therapies that are currently used in treating pulmonary hypertension (e.g. sildenafil).

[0445] In certain aspects, the present disclosure provides methods and agents for decreasing renal diseases or conditions (e.g., Alport syndrome, focal segmental glomerulosclerosis (FSGS), polycystic kidney diseases, chronic kidney disease) and decreasing the pathogenic mechanism contributing to such diseases or conditions, for example, by antagonizing functions of an ActRIIB polypeptide and/or an ActRIIB ligand. Therefore, any compound (e.g. variant ActRIIB polypeptides) identified can be tested in whole cells or tissues, in vitro or in vivo, to confirm their ability to decrease renal diseases or conditions (e.g., Alport syndrome, focal segmental glomerulosclerosis (FSGS), polycystic kidney diseases, chronic kidney disease). Various methods known in the art can be utilized for this purpose. For example, methods of the disclosure are performed such that the signal transduction through an ActRIIB protein activated by binding to an ActRIIB ligand (e.g., activin A, activin B, GDF8, GDF11, or BMP10) has been reduced or inhibited.

[0446] The present disclosure also contemplates in vivo assays to measure the effects of any compound (e.g. variant ActRIIB polypeptides) described herein on renal diseases or conditions (e.g., Alport syndrome, focal segmental glomerulosclerosis (FSGS), polycystic kidney diseases, chronic kidney disease). Various animal models of renal diseases or conditions (e.g., Alport syndrome, focal segmental glomerulosclerosis (FSGS), polycystic kidney diseases, chronic kidney disease) known in the art can be utilized for this purpose. These include animal models such as Unilateral Ureter Obstruction (UUO) model for renal fibrosis and Col4a3-/- Alport model. The effects of any compound on these animal models can assessed by measuring various parameters such as. the expression of various fibrotic genes (Fibronectin, PAI-1, CTGF, Col-I, Col-III, and a-SMA), inflammatory genes (MCP-1 and TNFα), Thrombospondin 1 (Thbs1), kidney injury gene (NGAL), and TGFβ superfamily ligands (TGFβ1, TGFβ2, TGFβ3, and activin A). Upregulation of these TGFβ superfamily ligands is highly associated with kidney fibrosis/kidney dysfunction, and they serve as a good indicator of kidney damage. In general, several fibrotic genes are upregulated by TGFβ during fibrosis. Thbs1 is a direct downstream target of TGFβ, and also plays a role in regulating TGFβ activation, including during fibrosis. Measuring expression levels of Thbs1 gives an indication of the level of fibrosis, as an increase in Thbs1 expression likely means an increase in TGFβ expression. In some embodiments, methods and agents of the present disclosure can be screened in combination with additional active agents and/or supportive therapies that are currently used in treating renal diseases or conditions (e.g., Alport syndrome, focal segmental glomerulosclerosis (FSGS), polycystic kidney diseases, chronic kidney disease). In some embodiments, methods and agents of the present disclosure can be compared to active agents and/or supportive therapies that are currently used in treating renal diseases or conditions (e.g., Alport syndrome, focal segmental glomerulosclerosis (FSGS), polycystic kidney diseases, chronic kidney disease).

[0447] In certain aspects, the present disclosure provides methods and agents for treating, preventing, or reducing the progression rate and/or severity of a renal diseases or conditions (e.g., Alport syndrome, focal segmental glomerulosclerosis (FSGS), polycystic kidney diseases, chronic kidney disease), for example, by antagonizing functions of an ActRIIB polypeptide and/or an ActRIIB ligand. Therefore, any compound (e.g. variant ActRIIB polypeptides) identified can be tested in whole cells or tissues, in vitro or in vivo, to confirm their ability to treat a renal diseases or conditions (e.g., Alport syndrome, focal segmental glomerulosclerosis (FSGS), polycystic kidney diseases, chronic kidney disease). Various methods known in the art can be utilized for this purpose. For example, methods of the disclosure are performed such that the signal transduction through an ActRIIB protein activated by binding to an ActRIIB ligand (e.g., activin A, activin B, GDF8, GDF11, or BMP10) has been reduced or inhibited.

[0448] In certain aspects, the present disclosure provides methods and agents for stimulating muscle growth and increasing muscle mass, for example, by antagonizing functions of an ActRIIB polypeptide and/or an ActRIIB ligand. Therefore, any compound identified can be tested in whole cells or tissues, in vitro or in vivo, to confirm their ability to modulate muscle growth. Various methods known in the art can be utilized for this purpose. For example, methods of the disclosure are performed such that the signal transduction through an ActRIIB protein activated by binding to an ActRIIB ligand (e.g., activin A, activin B, GDF8, GDF11, or BMP10) has been reduced or inhibited. It will be recognized that the growth of muscle tissue in the organism would result in an increased muscle mass in the organism as compared to the muscle mass of a corresponding organism (or population of organisms) in which the signal transduction through an ActRIIB protein had not been so effected.

[0449] For example, the effect of the variant ActRIIB polypeptides or test compounds on muscle cell growth/proliferation can be determined by measuring gene expression of Pax-3 and Myf-5 which are associated with proliferation of myogenic cells, and gene expression of MyoD which is associated with muscle differentiation (e.g., Amthor et al., Dev Biol. 2002, 251:241-57). It is known that GDF8 down-regulates gene expression of Pax-3 and Myf-5, and prevents gene expression of MyoD. The variant ActRIIB polypeptides or test compounds are expected to antagonize this activity of GDF8. Another example of cell-based assays includes measuring the proliferation of myoblasts such as C(2)C(12) myoblasts in the presence of the variant ActRIIB polypeptides or test compounds (e.g., Thomas et al., J Biol Chem. 2000, 275:40235-43).

[0450] The present disclosure also contemplates in vivo assays to measure muscle mass and strength. For example, Whittemore et al. (Biochem Biophys Res Commun. 2003, 300:965-71) discloses a method of measuring increased skeletal muscle mass and increased grip strength in mice. Optionally, this method can be used to determine therapeutic effects of test compounds (e.g., variant ActRIIB polypeptides) on muscle diseases or conditions, for example those diseases for which muscle mass is limiting.

[0451] In certain aspects, the present disclosure provides methods and agents for modulating (stimulating or inhibiting) bone formation and increasing bone mass. Therefore, any compound identified can be tested in whole cells or tissues, in vitro or in vivo, to confirm their ability to modulate bone or cartilage growth. Various methods known in the art can be utilized for this purpose. For example, the effect of the variant ActRIIB polypeptides or test compounds on bone or cartilage growth can be determined by measuring induction of Msx2 or differentiation of osteoprogenitor cells into osteoblasts in cell based assays (see, e.g., Daluiski et al., Nat Genet. 2001, 27(1):84-8; Hino et al., Front Biosci. 2004, 9: 1520-9). Another example of cell-based assays includes analyzing the osteogenic activity of the subject variant ActRIIB polypeptides and test compounds in mesenchymal progenitor and osteoblastic cells. To illustrate, recombinant adenoviruses expressing an ActRIIB polypeptide were constructed to infect pluripotent mesenchymal progenitor C3H10T1/2 cells, preosteoblastic C2C12 cells, and osteoblastic TE-85 cells. Osteogenic activity is then determined by measuring the induction of alkaline phosphatase, osteocalcin, and matrix mineralization (see, e.g., Cheng et al., J bone Joint Surg Am. 2003, 85-A(8):1544-52).

[0452] The present disclosure also contemplates in vivo assays to measure bone or cartilage growth. For example, Namkung-Matthai et al., Bone, 28:80-86 (2001) discloses a rat osteoporotic model in which bone repair during the early period after fracture is studied. Kubo et al., Steroid Biochemistry & Molecular Biology, 68:197-202 (1999) also discloses a rat osteoporotic model in which bone repair during the late period after fracture is studied. These references are incorporated by reference herein in their entirety for their disclosure of rat model for study on osteoporotic bone fracture. In certain aspects, the present disclosure makes use of fracture healing assays that are known in the art. These assays include fracture technique, histological analysis, and biomechanical analysis, which are described in, for example, U.S. Pat. No. 6,521,750, which is incorporated by reference in its entirety for its disclosure of experimental protocols for causing as well as measuring the extent of fractures, and the repair process.

[0453] In certain aspects, the present disclosure provides methods and agents for controlling weight gain and obesity. At the cellular level, adipocyte proliferation and differentiation is critical in the development of obesity, which leads to the generation of additional fat cells (adipocytes). Therefore, any compound identified can be tested in whole cells or tissues, in vitro or in vivo, to confirm their ability to modulate adipogenesis by measuring adipocyte proliferation or differentiation. Various methods known in the art can be utilized for this purpose. For example, the effect of a variant ActRIIB polypeptide (e.g., a soluble variant ActRIIB polypeptide) or test compounds on adipogenesis can be determined by measuring differentiation of 3T3-L1 preadipocytes to mature adipocytes in cell based assays, such as, by observing the accumulation of triacylglycerol in Oil Red O staining vesicles and by the appearance of certain adipocyte markers such as FABP (aP2/422) and PPARy2. See, for example, Reusch et al., 2000, Mol Cell Biol. 20:1008-20; Deng et al., 2000, Endocrinology. 141:2370-6; Bell et al., 2000, Obes Res. 8:249-54. Another example of cell-based assays includes analyzing the role of variant ActRIIB polypeptides and test compounds in proliferation of adipocytes or adipocyte precursor cells (e.g., 3T3-L1 cells), such as, by monitoring bromodeoxyuridine (BrdU)-positive cells. See, for example, Pico et al., 1998, Mol Cell Biochem. 189:1-7; Masuno et al., 2003, Toxicol Sci. 75:314-20.

[0454] It is understood that the screening assays of the present disclosure apply to not only the subject variant ActRIIB polypeptides, but also any test compounds including agonists and antagonist of the ActRIIB polypeptides. Further, these screening assays are useful for drug target verification and quality control purposes.

### 6. Exemplary Therapeutic Uses

[0455] In certain embodiments, compositions of the present disclosure (e.g., variant ActRIIB proteins in either homomeric or heteromeric forms) can be used for treating or preventing a disease or condition that is associated with abnormal activity of a TGFβ superfamily ligand, such as an ActRIIB and/or an ActRIIB ligand (e.g., activin A, activin B, GDF8, GDF11, or BMP10). These diseases, disorders or conditions are generally referred to herein as “ActRIIB-associated conditions.” In certain embodiments, the present disclosure provides methods of treating or preventing an individual in need thereof through administering to the individual a therapeutically effective amount of a variant ActRIIB protein as described herein. These methods are particularly aimed at therapeutic and prophylactic treatments of animals, and more particularly, humans. The terms “subject,” an “individual,” or a “patient” are interchangeable throughout the specification and refer to either a human or a non-human animal. These terms include mammals, such as humans, non-human primates, laboratory animals, livestock animals (including bovines, porcines, camels, etc.), companion animals (e.g., canines, felines, other domesticated animals, etc.) and rodents (e.g., mice and rats). In particular embodiments, the patient, subject or individual is a human.

[0456] The terms “treatment”, “treating”, “alleviation” and the like are used herein to generally mean obtaining a desired pharmacologic and/or physiologic effect, and may also be used to refer to improving, alleviating, and/or decreasing the severity of one or more clinical complication of a condition being treated. The effect may be prophylactic in terms of completely or partially delaying the onset or recurrence of a disease, condition, or complications thereof, and/or may be therapeutic in terms of a partial or complete cure for a disease or condition and/or adverse effect attributable to the disease or condition. “Treatment” as used herein covers any treatment of a disease or condition of a mammal, particularly a human. As used herein, a therapeutic that “prevents” a disorder or condition refers to a compound that, in a statistical sample, reduces the occurrence of the disorder or condition in a treated sample relative to an untreated control sample, or delays the onset of the disease or condition, relative to an untreated control sample.

[0457] In general, treatment or prevention of a disease or condition as described in the present disclosure is achieved by administering one or more variant ActRIIB proteins of the present disclosure (e.g., variant ActRIIB proteins in either homomeric or heteromeric forms) in an “effective amount”. An effective amount of an agent refers to an amount effective, at dosages and for periods of time necessary, to achieve the desired therapeutic or prophylactic result. A “therapeutically effective amount” of an agent of the present disclosure may vary according to factors such as the disease state, age, sex, and weight of the individual, and the ability of the agent to elicit a desired response in the individual. A “prophylactically effective amount” refers to an amount effective, at dosages and for periods of time necessary, to achieve the desired prophylactic result.

[0458] In certain aspects, the disclosure contemplates the use of a variant ActRIIB protein in either homomeric or heteromeric form, in combination with one or more additional active agents or other supportive therapy for treating or preventing a disease or condition (e.g., anemia, renal disease, pulmonary hypertension, pulmonary arterial hypertension, and ILD). As used herein, “in combination with”, “combinations of”, “combined with”, or “conjoint” administration refers to any form of administration such that additional active agents or supportive therapies (e.g., second, third, fourth, etc.) are still effective in the body (e.g., multiple compounds are simultaneously effective in the patient for some period of time, which may include synergistic effects of those compounds). Effectiveness may not correlate to measurable concentration of the agent in blood, serum, or plasma. For example, the different therapeutic compounds can be administered either in the same formulation or in separate formulations, either concomitantly or sequentially, and on different schedules. Thus, a subject who receives such treatment can benefit from a combined effect of different active agents or therapies. One or more a variant ActRIIB proteins of the disclosure can be administered concurrently with, prior to, or subsequent to, one or more other additional agents or supportive therapies, such as those disclosed herein. In general, each active agent or therapy will be administered at a dose and/or on a time schedule determined for that particular agent. The particular combination to employ in a regimen will take into account compatibility of the variant ActRIIB protein in either homomeric or heteromeric form of the present disclosure with the additional active agent or therapy and/or the desired effect.

[0459] Endogenous complexes between ActRIIB and ActRIIB ligands play essential roles in tissue growth as well as early developmental processes such as the correct formation of various structures or in one or more post-developmental capacities including sexual development, pituitary hormone production, and creation of bone and cartilage. Thus, ActRIIB-associated conditions include abnormal tissue growth and developmental defects. In addition, ActRIIB-associated conditions include, but are not limited to, disorders of cell growth and differentiation such as pulmonary disorders (e.g., pulmonary hypertension, interstitial lung disease, idiopathic pulmonary fibrosis), renal disease (e.g., Alport syndrome and focal segmental glomerulosclerosis), peripheral neuropathy, Charcot-Marie-Tooth disease, anemia (e.g., anemia associated with myelodysplastic syndrome, thalassemia or myelofibrosis), inflammation, allergy, autoimmune diseases, infectious diseases, and tumors. In certain embodiments, the present disclosure provides methods of promoting growth of a tissue or diminishing or preventing a loss of a tissue in a human. Exemplary tissues include renal tissue, pulmonary tissue, cardiac tissue, bone, cartilage, muscle, fat, and nervous tissue.

[0460] Exemplary ActRIIB-associated conditions include muscle disorders (e.g. neuromuscular disorders, musculodegenerative disorders, muscular dystrophy, muscle atrophy, muscle wasting associated with COPD, muscle wasting syndrome, sarcopenia, and cachexia), adipose tissue disorders (e.g., obesity), type 2 diabetes, bone degenerative disease (e.g., osteoporosis), pulmonary disorders (e.g., pulmonary hypertension, pulmonary arterial hypertension, interstitial lung disease, idiopathic pulmonary fibrosis, congestive obstructive pulmonary disease (COPD)), renal disease (e.g., Alport syndrome and focal segmental glomerulosclerosis), peripheral neuropathy, and Charcot-Marie-Tooth disease Other exemplary ActRIIB-associated conditions include anemia (e.g., anemia associated with myelodysplastic syndrome, anemia associated with thalassemia, or anemia associated with myelofibrosis), tissue repair (e.g., wound healing), neurodegenerative diseases (e.g., amyotrophic lateral sclerosis, spinal muscular atrophy), immunologic disorders (e.g., disorders related to abnormal proliferation or function of lymphocytes), and obesity or disorders related to abnormal proliferation of adipocytes.

[0461] In some embodiments, the disclosure relate to methods for treating a muscle-related disorder in a patient, comprising administering a patient in need thereof an ActRIIB polypeptide, including variant ActRIIB polypeptides as well as homomultimer and heteromultimers comprising the same, as described herein. In some embodiments, the disorder is associated with undesirably low muscle growth and/or muscle weakness. Such disorders include muscle atrophy, muscular dystrophy, amyotrophic lateral sclerosis (ALS), spinal muscular atrophy, muscle wasting disorders, cachexia, anorexia, DMD syndrome, BMD syndrome, AIDS wasting syndrome, muscular dystrophies, neuromuscular diseases, motor neuron diseases, diseases of the neuromuscular junction, facioscapulohumeral muscular dystrophy, Charcot-Marie-Tooth disease, peripheral neuropathy, and inflammatory myopathies.

[0462] In certain embodiments, ActRIIB polypeptides described herein (e.g., variant ActRIIB proteins in either homomeric or heteromeric forms) are used as part of a treatment for a muscular dystrophy. The term “muscular dystrophy” refers to a group of degenerative muscle diseases characterized by gradual weakening and deterioration of skeletal muscles and sometimes the heart and respiratory muscles. Muscular dystrophies are genetic disorders characterized by progressive muscle wasting and weakness that begin with microscopic changes in the muscle. As muscles degenerate over time, the person’s muscle strength declines. Exemplary muscular dystrophies that can be treated with a regimen including the subject variant ActRIIB proteins include: Duchenne muscular dystrophy (DMD), Becker muscular dystrophy (BMD), Emery-Dreifuss muscular dystrophy (EDMD), limb-girdle muscular dystrophy (LGMD), facioscapulohumeral muscular dystrophy (FSH or FSHD) (also known as Landouzy-Dejerine), myotonic dystrophy (MMD) (also known as Steinert’s disease), oculopharyngeal muscular dystrophy (OPMD), distal muscular dystrophy (DD), congenital muscular dystrophy (CMD).

[0463] Duchenne muscular dystrophy (DMD) was first described by the French neurologist Guillaume Benjamin Amand Duchenne in the 1860 s. Becker muscular dystrophy (BMD) is named after the German doctor Peter Emil Becker, who first described this variant of DMD in the 1950 s. DMD is one of the most frequent inherited diseases in males, affecting one in 3,500 boys. DMD occurs when the dystrophin gene, located on the short arm of the X chromosome, is broken. Since males only carry one copy of the X chromosome, they only have one copy of the dystrophin gene. Without the dystrophin protein, muscle is easily damaged during cycles of contraction and relaxation. While early in the disease muscle compensates by regeneration, later on muscle progenitor cells cannot keep up with the ongoing damage and healthy muscle is replaced by non-functional fibro-fatty tissue.

[0464] BMD results from different mutations in the dystrophin gene. BMD patients have some dystrophin, but it is either insufficient in quantity or poor in quality. Having some dystrophin protects the muscles of those with BMD from degenerating as badly or as quickly as those of people with DMD.

[0465] For example, studies demonstrate that blocking or eliminating function of GDF8 in vivo can effectively treat at least certain symptoms in DMD and BMD patients. Thus, the subject variant ActRIIB proteins (e.g., variant ActRIIB proteins in either homomeric or heteromeric forms) may act as GDF8 inhibitors (antagonists), and constitute an alternative means of blocking the functions of GDF8 and/or ActRIIB in vivo in DMD and BMD patients.

[0466] In other embodiments, the subject ActRIIB polypeptides (e.g., variant ActRIIB proteins in either homomeric or heteromeric forms) can be used to form pharmaceutical compositions that can be beneficially used to prevent, treat, or alleviate symptoms of a host of diseases involving neurodegeneration. While not wishing to be bound by any particular theory, the subject ActRIIB polypeptides (e.g., variant ActRIIB proteins in either homomeric or heteromeric forms) may antagonize the inhibitory feedback mechanism mediated through the type I receptor ALK7, thus allowing new neuronal growth and differentiation. The subject ActRIIB polypeptides (e.g., variant ActRIIB proteins in either homomeric or heteromeric forms) as pharmaceutical compositions can be beneficially used to prevent, treat, or alleviate symptoms of diseases with neurodegeneration, including Alzheimer’s Disease (AD), Parkinson’s Disease (PD), Amyotrophic Lateral Sclerosis (ALS), Spinal Muscular Atrophy (SMA), and Huntington’s disease (HD).

[0467] AD is a chronic, incurable, and unstoppable central nervous system (CNS) disorder that occurs gradually, resulting in memory loss, unusual behavior, personality changes, and a decline in thinking abilities. These losses are related to the death of specific types of brain cells and the breakdown of connections between them. AD has been described as childhood development in reverse. In most people with AD, symptoms appear after the age 60. The earliest symptoms include loss of recent memory, faulty judgment, and changes in personality. Later in the disease, those with AD may forget how to do simple tasks like washing their hands. Eventually people with AD lose all reasoning abilities and become dependent on other people for their everyday care. Finally, the disease becomes so debilitating that patients are bedridden and typically develop coexisting illnesses. AD patients most commonly die from pneumonia, 8 to 20 years from disease onset.

[0468] PD is a chronic, incurable, and unstoppable CNS disorder that occurs gradually and results in uncontrolled body movements, rigidity, tremor, and gait difficulties. These motor system problems are related to the death of brain cells in an area of the brain that produces dopamine, a chemical that helps control muscle activity. In most people with PD, symptoms appear after age 50. The initial symptoms of PD are a pronounced tremor affecting the extremities, notably in the hands or lips. Subsequent characteristic symptoms of PD are stiffness or slowness of movement, a shuffling walk, stooped posture, and impaired balance. There are wide ranging secondary symptoms such as memory loss, dementia, depression, emotional changes, swallowing difficulties, abnormal speech, sexual dysfunction, and bladder and bowel problems. These symptoms will begin to interfere with routine activities, such as holding a fork or reading a newspaper. Finally, people with PD become so profoundly disabled that they are bedridden. People with PD usually die from pneumonia.

[0469] The causes of these neurological diseases have remained largely unknown. They are conventionally defined as distinct diseases, yet clearly show extraordinary similarities in basic processes and commonly demonstrate overlapping symptoms far greater than would be expected by chance alone. Current disease definitions fail to properly deal with the issue of overlap and a new classification of the neurodegenerative disorders has been called for.

[0470] HD is another neurodegenerative disease resulting from genetically programmed degeneration of neurons in certain areas of the brain. This degeneration causes uncontrolled movements, loss of intellectual faculties, and emotional disturbance. HD is a familial disease, passed from parent to child through a dominant mutation in the wild-type gene. Some early symptoms of HD are mood swings, depression, irritability, or trouble driving, learning new things, remembering a fact, or making a decision. As the disease progresses, concentration on intellectual tasks becomes increasingly difficult and the patient may have difficulty feeding himself or herself and swallowing. The rate of disease progression and the age of onset vary from person to person.

[0471] Tay-Sachs disease and Sandhoff disease are glycolipid storage diseases caused by the lack of lysosomal β-hexosaminidase (Gravel et al., in The Metabolic Basis of Inherited Disease, eds. Scriver et al., McGraw-Hill, New York, pp. 2839-2879, 1995). In both disorders, GM2 ganglioside and related glycolipid substrates for β-hexosaminidase accumulate in the nervous system and trigger acute neurodegeneration. In the most severe forms, the onset of symptoms begins in early infancy. A precipitous neurodegenerative course then ensues, with affected infants exhibiting motor dysfunction, seizure, visual loss, and deafness. Death usually occurs by 2-5 years of age. Neuronal loss through an apoptotic mechanism has been demonstrated (Huang et al., Hum. Mol. Genet. 6: 1879-1885, 1997).

[0472] It is well known that apoptosis plays a role in AIDS pathogenesis in the immune system. However, HIV-1 also induces neurological disease. Shi et al. (J. Clin. Invest. 98: 1979-1990, 1996) examined apoptosis induced by HIV-1 infection of the central nervous system (CNS) in an in vitro model and in brain tissue from AIDS patients, and found that HIV-1 infection of primary brain cultures induced apoptosis in neurons and astrocytes in vitro. Apoptosis of neurons and astrocytes was also detected in brain tissue from 10/11 AIDS patients, including 5/5 patients with HIV-1 dementia and ⅘ nondemented patients.

[0473] Neuronal loss is also a salient feature of prion diseases, such as Creutzfeldt-Jakob disease in human, BSE in cattle (mad cow disease), Scrapie Disease in sheep and goats, and feline spongiform encephalopathy (FSE) in cats.

[0474] The subject ActRIIB polypeptides (e.g., variant ActRIIB proteins in either homomeric or heteromeric forms) may also be useful to prevent, treat, and alleviate symptoms of various peripheral nervous system (PNS) disorders, such as the ones described below. The PNS is composed of the nerves that lead to or branch off from the CNS. The peripheral nerves handle a diverse array of functions in the body, including sensory, motor, and autonomic functions. When an individual has a peripheral neuropathy, nerves of the PNS have been damaged. Nerve damage can arise from a number of causes, such as disease, physical injury, poisoning, or malnutrition. These agents may affect either afferent or efferent nerves. Depending on the cause of damage, the nerve cell axon, its protective myelin sheath, or both may be injured or destroyed.

[0475] The term “peripheral neuropathy” encompasses a wide range of disorders in which the nerves outside of the brain and spinal cord—peripheral nerves—have been damaged. Peripheral neuropathy may also be referred to as peripheral neuritis, or if many nerves are involved, the terms polyneuropathy or polyneuritis may be used.

[0476] Peripheral neuropathy is a widespread disorder, and there are many underlying causes. Some of these causes are common, such as diabetes, and others are extremely rare, such as acrylamide poisoning and certain inherited disorders. The most common worldwide cause of peripheral neuropathy is leprosy. Leprosy is caused by the bacterium Mycobacterium leprae, which attacks the peripheral nerves of affected people. While leprosy is rare in the United States, according to statistics gathered by the World Health Organization, an estimated 1.15 million people have leprosy worldwide.

[0477] In the United States, diabetes is the most commonly known cause of peripheral neuropathy. It has been estimated that more than 17 million people in the United States and Europe have diabetes-related polyneuropathy. Many neuropathies are idiopathic - no known cause can be found. The most common of the inherited peripheral neuropathies in the United States is Charcot-Marie-Tooth disease (CMT), which affects approximately 125,000 persons.

[0478] Another of the better known peripheral neuropathies is Guillain-Barre syndrome, which arises from complications associated with viral illnesses, such as cytomegalovirus, Epstein-Barr virus, and human immunodeficiency virus (HIV), or bacterial infection, including Campylobacter jejuni and Lyme disease. The worldwide incidence rate is approximately 1.7 cases per 100,000 people annually. Other well-known causes of peripheral neuropathies include chronic alcoholism, infection of the varicella-zoster virus, botulism, and poliomyelitis. Peripheral neuropathy may develop as a primary symptom, or it may be due to another disease. For example, peripheral neuropathy is only one symptom of diseases such as amyloid neuropathy, certain cancers, or inherited neurologic disorders. Such diseases may affect the peripheral nervous system (PNS) and the central nervous system (CNS), as well as other body tissues.

[0479] Other PNS diseases treatable with the subject ActRIIB polypeptides (e.g., variant ActRIIB proteins in either homomeric or heteromeric forms) include: Brachial Plexus Neuropathies (diseases of the cervical and first thoracic roots, nerve trunks, cords, and peripheral nerve components of the brachial plexus. Clinical manifestations include regional pain, paresthesia, muscle weakness, and decreased sensation in the upper extremity. These disorders may be associated with trauma, including birth injuries; thoracic outlet syndrome; neoplasms, neuritis, radiotherapy; and other conditions. See Adams et al., Principles of Neurology, 6th ed, pp1351-2); Diabetic Neuropathies (peripheral, autonomic, and cranial nerve disorders that are associated with diabetes mellitus). These conditions usually result from diabetic microvascular injury involving small blood vessels that supply nerves (vasa nervorum). Relatively common conditions which may be associated with diabetic neuropathy include third nerve palsy; mononeuropathy; mononeuropathy multiplex; diabetic amyotrophy; a painful polyneuropathy; autonomic neuropathy; and thoracoabdominal neuropathy (see Adams et al., Principles of Neurology, 6th ed, p1325); mononeuropathies (disease or trauma involving a single peripheral nerve in isolation, or out of proportion to evidence of diffuse peripheral nerve dysfunction). Mononeuropathy multiplex refers to a condition characterized by multiple isolated nerve injuries. Mononeuropathies may result from a wide variety of causes, including ischemia; traumatic injury; compression; connective tissue diseases; cumulative trauma disorders; and other conditions); Neuralgia (intense or aching pain that occurs along the course or distribution of a peripheral or cranial nerve); Peripheral Nervous System Neoplasms (neoplasms which arise from peripheral nerve tissue. This includes neurofibromas; Schwannomas; granular cell tumors; and malignant peripheral nerve sheath tumors. See DeVita Jr et al., Cancer: Principles and Practice of Oncology, 5th ed, pp1750-1); Nerve Compression Syndromes (mechanical compression of nerves or nerve roots from internal or external causes. These may result in a conduction block to nerve impulses, due to, for example, myelin sheath dysfunction, or axonal loss. The nerve and nerve sheath injuries may be caused by ischemia; inflammation; a direct mechanical effect; or Neuritis (a general term indicating inflammation of a peripheral or cranial nerve). Clinical manifestation may include pain; paresthesia; paresis; or hyperthesia; Polyneuropathies (diseases of multiple peripheral nerves). The various forms are categorized by the type of nerve affected (e.g., sensory, motor, or autonomic), by the distribution of nerve injury (e.g., distal vs. proximal), by nerve component primarily affected (e.g., demyelinating vs. axonal), by etiology, or by pattern of inheritance.

[0480] Similarly, the subject ActRIIB proteins (e.g., variant ActRIIB proteins in either homomeric or heteromeric forms) provide an effective means to increase muscle mass in other disease conditions that are in need of muscle growth. For example, ALS, also called Lou Gehrig’s disease (motor neuron disease) is a chronic, incurable, and unstoppable CNS disorder that attacks the motor neurons, components of the CNS that connect the brain to the skeletal muscles. In ALS, the motor neurons deteriorate and eventually die, and though a person’s brain normally remains fully functioning and alert, the command to move never reaches the muscles. Most people who get ALS are between 40 and 70 years old. The first motor neurons that weaken are those leading to the arms or legs. Those with ALS may have trouble walking, they may drop things, fall, slur their speech, and laugh or cry uncontrollably. Eventually the muscles in the limbs begin to atrophy from disuse. This muscle weakness will become debilitating and a person will need a wheel chair or become unable to function out of bed. Most ALS patients die from respiratory failure or from complications of ventilator assistance like pneumonia, 3-5 years from disease onset.

[0481] ActRIIB protein-induced increased muscle mass using the subject ActRIIB proteins (e.g., variant ActRIIB proteins in either homomeric or heteromeric forms) might also benefit those suffering from muscle wasting diseases. Gonzalez-Cadavid et al. (supra) reported that that GDF8 expression correlates inversely with fat-free mass in humans and that increased expression of the GDF8 gene is associated with weight loss in men with AIDS wasting syndrome. By inhibiting the function of GDF8 in AIDS patients, at least certain symptoms of AIDS may be alleviated, if not completely eliminated, thus significantly improving quality of life in AIDS patients.

[0482] Since loss of GDF8 function is also associated with fat loss without diminution of nutrient intake (Zimmers et al., supra; McPherron and Lee, supra), the subject ActRIIB proteins (e.g., variant ActRIIB proteins in either homomeric or heteromeric forms) may further be used as a therapeutic agent for slowing or preventing the development of obesity and type 2 diabetes.

[0483] Cancer anorexia-cachexia syndrome is among the most debilitating and life-threatening aspects of cancer. Progressive weight loss in cancer anorexia-cachexia syndrome is a common feature of many types of cancer and is responsible not only for a poor quality of life and poor response to chemotherapy, but also a shorter survival time than is found in patients with comparable tumors without weight loss. Associated with anorexia, fat and muscle tissue wasting, psychological distress, and a lower quality of life, cachexia arises from a complex interaction between the cancer and the host. It is one of the most common causes of death among cancer patients and is present in 80% at death. It is a complex example of metabolic chaos effecting protein, carbohydrate, and fat metabolism. Tumors produce both direct and indirect abnormalities, resulting in anorexia and weight loss. Currently, there is no treatment to control or reverse the process. Cancer anorexia-cachexia syndrome affects cytokine production, release of lipid-mobilizing and proteolysis-inducing factors, and alterations in intermediary metabolism. Although anorexia is common, a decreased food intake alone is unable to account for the changes in body composition seen in cancer patients, and increasing nutrient intake is unable to reverse the wasting syndrome. Cachexia should be suspected in patients with cancer if an involuntary weight loss of greater than five percent of premorbid weight occurs within a six-month period. ActRIIB polypeptides (e.g., variant ActRIIB proteins in either homomeric or heteromeric forms) disclosed herein may be useful for treating an activin-dependent cancer, such as ovarian cancer.

[0484] Since systemic overexpression of GDF8 in adult mice was found to induce profound muscle and fat loss analogous to that seen in human cachexia syndromes (Zimmers et al., supra), the subject ActRIIB proteins (e.g., variant ActRIIB proteins in either homomeric or heteromeric forms) as pharmaceutical compositions can be beneficially used to prevent, treat, or alleviate the symptoms of the cachexia syndrome, where muscle growth is desired.

[0485] In other embodiments, the present disclosure provides methods of inducing bone and/or cartilage formation, preventing bone loss, increasing bone mineralization, or preventing the demineralization of bone. For example, the subject ActRIIB proteins (e.g., variant ActRIIB proteins in either homomeric or heteromeric forms) have application in treating osteoporosis and the healing of bone fractures and cartilage defects in humans and other animals. ActRIIB proteins (e.g., variant ActRIIB proteins in either homomeric or heteromeric forms) may be useful in patients that are diagnosed with subclinical low bone density, as a protective measure against the development of osteoporosis.

[0486] In one specific embodiment, methods and compositions of the present disclosure may find medical utility in the healing of bone fractures and cartilage defects in humans and other animals. The subject methods and compositions may also have prophylactic use in closed as well as open fracture reduction and also in the improved fixation of artificial joints. De novo bone formation induced by an osteogenic agent contributes to the repair of congenital, trauma-induced, or oncologic resection induced craniofacial defects, and also is useful in cosmetic plastic surgery. Further, methods and compositions of the disclosure may be used in the treatment of periodontal disease, and in other tooth repair processes. In certain cases, the subject ActRIIB proteins (e.g., variant ActRIIB proteins in either homomeric or heteromeric forms) may provide an environment to attract bone-forming cells, stimulate growth of bone-forming cells or induce differentiation of progenitors of bone-forming cells. ActRIIB proteins described herein (e.g., variant ActRIIB proteins in either homomeric or heteromeric forms) may also be useful in the treatment of osteoporosis. Further, ActRIIB proteins (e.g., variant ActRIIB proteins in either homomeric or heteromeric forms) may be used in cartilage defect repair and prevention/reversal of osteoarthritis.

[0487] In another specific embodiment, the disclosure provides a therapeutic method and composition for repairing fractures and other conditions related to cartilage and/or bone defects or periodontal diseases. The disclosure further provides therapeutic methods and compositions for wound healing and tissue repair. The types of wounds include, but are not limited to, burns, incisions and ulcers. See e.g., PCT Publication No. WO84/01106. Such compositions comprise a therapeutically effective amount of at least one of the ActRIIB proteins disclosed herein (e.g., variant ActRIIB proteins in either homomeric or heteromeric forms) in admixture with a pharmaceutically acceptable vehicle, carrier, or matrix.

[0488] In another specific embodiment, ActRIIB proteins described herein (e.g., variant ActRIIB proteins in either homomeric or heteromeric forms) can be applied to conditions causing bone loss such as osteoporosis, hyperparathyroidism, Cushing’s disease, thyrotoxicosis, chronic diarrheal state or malabsorption, renal tubular acidosis, or anorexia nervosa. Many people know that being female, having a low body weight, and leading a sedentary lifestyle are risk factors for osteoporosis (loss of bone mineral density, leading to fracture risk). However, osteoporosis can also result from the long-term use of certain medications. Osteoporosis resulting from drugs or another medical condition is known as secondary osteoporosis. In a condition known as Cushing’s disease, the excess amount of cortisol produced by the body results in osteoporosis and fractures. The most common medications associated with secondary osteoporosis are the corticosteroids, a class of drugs that act like cortisol, a hormone produced naturally by the adrenal glands. Although adequate levels of thyroid hormones (which are produced by the thyroid gland) are needed for the development of the skeleton, excess thyroid hormone can decrease bone mass over time. Antacids that contain aluminum can lead to bone loss when taken in high doses by people with kidney problems, particularly those undergoing dialysis. Other medications that can cause secondary osteoporosis include phenytoin (Dilantin) and barbiturates that are used to prevent seizures; methotrexate (Rheumatrex, Immunex, Folex PFS), a drug for some forms of arthritis, cancer, and immune disorders; cyclosporine (Sandimmune, Neoral), a drug used to treat some autoimmune diseases and to suppress the immune system in organ transplant patients; luteinizing hormone-releasing hormone agonists (Lupron, Zoladex), used to treat prostate cancer and endometriosis; heparin (Calciparine, Liquaemin), an anticlotting medication; and cholestyramine (Questran) and colestipol (Colestid), used to treat high cholesterol. Gum disease causes bone loss because these harmful bacteria in our mouths force our bodies to defend against them. The bacteria produce toxins and enzymes under the gum-line, causing a chronic infection.

[0489] In a further embodiment, ActRIIB polypeptides of the present disclosure (e.g., variant ActRIIB proteins in either homomeric or heteromeric forms) provide methods and therapeutic agents for treating diseases or disorders associated with abnormal or unwanted bone growth. For example, patients having the disease known as fibrodysplasia ossificans progressiva (FOP) grow an abnormal “second skeleton” that prevents any movement. Additionally, abnormal bone growth can occur after hip replacement surgery and thus ruin the surgical outcome. This is a more common example of pathological bone growth and a situation in which the subject methods and compositions may be therapeutically useful. The same methods and compositions may also be useful for treating other forms of abnormal bone growth (e.g., pathological growth of bone following trauma, burns or spinal cord injury), and for treating or preventing the undesirable conditions associated with the abnormal bone growth seen in connection with metastatic prostate cancer or osteosarcoma.

[0490] In other embodiments, ActRIIB polypeptides of the present disclosure (e.g., variant ActRIIB proteins in either homomeric or heteromeric forms) provide compositions and methods for regulating body fat content in an animal and for treating or preventing conditions related thereto, and particularly, health-compromising conditions related thereto. According to the present disclosure, to regulate (control) body weight can refer to reducing or increasing body weight, reducing or increasing the rate of weight gain, or increasing or reducing the rate of weight loss, and also includes actively maintaining, or not significantly changing body weight (e.g., against external or internal influences which may otherwise increase or decrease body weight). One embodiment of the present disclosure relates to regulating body weight by administering to an animal (e.g., a human) in need thereof an ActRIIB polypeptide (e.g., variant ActRIIB proteins in either homomeric or heteromeric forms).

[0491] In some embodiments, the disclosure relate to methods for decreasing the body fat content or reducing the rate of increase in body fat content, and for treating a disorder associated with undesirable body weight gain, such as obesity, non-insulin dependent diabetes mellitus (NIDDM), cardiovascular disease, cancer, hypertension, osteoarthritis, stroke, respiratory problems, and gall bladder disease, comprising administering a patient in need thereof a ActRIIB polypeptide (e.g., variant ActRIIB proteins in either homomeric or heteromeric forms), as described herein.

[0492] In one specific embodiment, the present disclosure relates to methods and compounds for reducing body weight and/or reducing weight gain in an animal, and more particularly, for treating or ameliorating obesity in patients at risk for or suffering from obesity. In another specific embodiment, the present disclosure is directed to methods and compounds for treating an animal that is unable to gain or retain weight (e.g., an animal with a wasting syndrome). Such methods are effective to increase body weight and/or mass, or to reduce weight and/or mass loss, or to improve conditions associated with or caused by undesirably low (e.g., unhealthy) body weight and/or mass.

[0493] In some embodiments, ActRIIB polypeptides of the present disclosure (e.g., variant ActRIIB proteins in either homomeric or heteromeric forms) can be used to increase red blood cell levels, increase hemoglobin levels, treat or prevent an anemia, and/or treat or prevent ineffective erythropoiesis in a subject in need thereof. In some embodiments, variant ActRIIB polypeptides as well as homomultimer and heteromultimers thereof of the present disclosure may be used in combination with conventional therapeutic approaches for increasing red blood cell levels, particularly those used to treat anemias of multifactorial origin. Conventional therapeutic approaches for increasing red blood cell levels include, for example, red blood cell transfusion, administration of one or more EPO receptor activators, hematopoietic stem cell transplantation, immunosuppressive biologics and drugs (e.g., corticosteroids). In certain embodiments, ActRIIB polypeptides of the present disclosure (e.g., variant ActRIIB proteins in either homomeric or heteromeric forms) can be used to treat or prevent an anemia in a subject in need thereof. In certain embodiments, ActRIIB polypeptides of the present disclosure (e.g., variant ActRIIB proteins in either homomeric or heteromeric forms) can be used to treat or prevent ineffective erythropoiesis and/or the disorders associated with ineffective erythropoiesis in a subject in need thereof. In certain aspects, ActRIIB polypeptides of the present disclosure (e.g., variant ActRIIB proteins in either homomeric or heteromeric forms) can be used in combination with conventional therapeutic approaches for treating or preventing an anemia or ineffective erythropoiesis disorder, particularly those used to treat anemias of multifactorial origin. In some embodiments, the disclosure relates to methods for increasing red blood cell levels, increasing hemoglobin levels, treating or preventing an anemia, and/or treating or preventing ineffective erythropoiesis in a patient comprising administering a patient in need thereof an ActRIIB polypeptide (e.g., variant ActRIIB proteins in either homomeric or heteromeric forms), as described herein.

[0494] In certain embodiments, one or more ActRIIB proteins of the disclosure (e.g., variant ActRIIB proteins in either homomeric or heteromeric forms), optionally combined with an EPO receptor activator, may be used to increase red blood cell, hemoglobin, or reticulocyte levels in healthy individuals and selected patient populations. Examples of appropriate patient populations include those with undesirably low red blood cell or hemoglobin levels, such as patients having an anemia, and those that are at risk for developing undesirably low red blood cell or hemoglobin levels, such as those patients who are about to undergo major surgery or other procedures that may result in substantial blood loss. In one embodiment, a patient with adequate red blood cell levels is treated with one or more ActRIIB proteins (e.g., variant ActRIIB proteins in either homomeric or heteromeric forms) to increase red blood cell levels, and then blood is drawn and stored for later use in transfusions.

[0495] One or more ActRIIB proteins of the disclosure (e.g., variant ActRIIB proteins in either homomeric or heteromeric forms), optionally combined with an EPO receptor activator, may be used to increase red blood cell levels, hemoglobin levels, and/or hematocrit levels in a patient having an anemia. When observing hemoglobin and/or hematocrit levels in humans, a level of less than normal for the appropriate age and gender category may be indicative of anemia, although individual variations are taken into account. For example, a hemoglobin level from 10-12.5 g/dl, and typically about 11.0 g/dl is considered to be within the normal range in health adults, although, in terms of therapy, a lower target level may cause fewer cardiovascular side effects [see, e.g., Jacobs et al. (2000) Nephrol Dial Transplant 15, 15-19]. Alternatively, hematocrit levels (percentage of the volume of a blood sample occupied by the cells) can be used as a measure for anemia. Hematocrit levels for healthy individuals range from about 41-51% for adult males and from 35-45% for adult females. In certain embodiments, a patient may be treated with a dosing regimen intended to restore the patient to a target level of red blood cells, hemoglobin, and/or hematocrit. As hemoglobin and hematocrit levels vary from person to person, optimally, the target hemoglobin and/or hematocrit level can be individualized for each patient.

[0496] Anemia is frequently observed in patients having a tissue injury, an infection, and/or a chronic disease, particularly cancer. In some subjects, anemia is distinguished by low erythropoietin levels and/or an inadequate response to erythropoietin in the bone marrow [see, e.g., Adamson (2008) Harrison’s Principles of Internal Medicine, 17th ed.; McGraw Hill, New York, pp 628-634]. Potential causes of anemia include, for example, blood loss, nutritional deficits (e.g. reduced dietary intake of protein), medication reaction, various problems associated with the bone marrow, and many diseases. More particularly, anemia has been associated with a variety of disorders and conditions that include, for example, bone marrow transplantation; solid tumors (e.g., breast cancer, lung cancer, and colon cancer); tumors of the lymphatic system (e.g., chronic lymphocyte leukemia, non-Hodgkins lymphoma, and Hodgkins lymphoma); tumors of the hematopoietic system (e.g., leukemia, a myelodysplastic syndrome and multiple myeloma); radiation therapy; chemotherapy (e.g., platinum containing regimens); inflammatory and autoimmune diseases, including, but not limited to, rheumatoid arthritis, other inflammatory arthritides, systemic lupus erythematosis (SLE), acute or chronic skin diseases (e.g., psoriasis), inflammatory bowel disease (e.g., Crohn’s disease and ulcerative colitis); acute or chronic renal disease or failure, including idiopathic or congenital conditions; acute or chronic liver disease; acute or chronic bleeding; situations where transfusion of red blood cells is not possible due to patient allo- or auto-antibodies and/or for religious reasons (e.g., some Jehovah’s Witnesses); infections (e.g., malaria and osteomyelitis); hemoglobinopathies including, for example, sickle cell disease (anemia), thalassemias; drug use or abuse (e.g., alcohol misuse); pediatric patients with anemia from any cause to avoid transfusion; and elderly patients or patients with underlying cardiopulmonary disease with anemia who cannot receive transfusions due to concerns about circulatory overload [see, e.g., Adamson (2008) Harrison’s Principles of Internal Medicine, 17th ed.; McGraw Hill, New York, pp 628-634]. In some embodiments, one or more ActRIIB proteins of the disclosure (e.g., variant ActRIIB proteins in either homomeric or heteromeric forms) could be used to treat or prevent anemia associated with one or more of the disorders or conditions disclosed herein.

[0497] Many factors can contribute to cancer-related anemia. Some are associated with the disease process itself and the generation of inflammatory cytokines such as interleukin-1, interferon-gamma, and tumor necrosis factor [Bron et al. (2001) Semin Oncol 28(Suppl 8): 1-6]. Among its effects, inflammation induces the key iron-regulatory peptide hepcidin, thereby inhibiting iron export from macrophages and generally limiting iron availability for erythropoiesis [see, e.g., Ganz (2007) J Am Soc Nephrol 18:394-400]. Blood loss through various routes can also contribute to cancer-related anemia. The prevalence of anemia due to cancer progression varies with cancer type, ranging from 5% in prostate cancer up to 90% in multiple myeloma. Cancer-related anemia has profound consequences for patients, including fatigue and reduced quality of life, reduced treatment efficacy, and increased mortality. In some embodiments, one or more ActRIIB proteins of the disclosure (e.g., variant ActRIIB proteins in either homomeric or heteromeric forms), optionally combined with an EPO receptor activator, could be used to treat a cancer-related anemia.

[0498] A hypoproliferative anemia can result from primary dysfunction or failure of the bone marrow. Hypoproliferative anemias include: anemia of chronic disease, anemia of kidney disease, anemia associated with hypometabolic states, and anemia associated with cancer. In each of these types, endogenous erythropoietin levels are inappropriately low for the degree of anemia observed. Other hypoproliferative anemias include: early-stage iron-deficient anemia, and anemia caused by damage to the bone marrow. In these types, endogenous erythropoietin levels are appropriately elevated for the degree of anemia observed. Prominent examples would be myelosuppression caused by cancer and/or chemotherapeutic drugs or cancer radiation therapy. A broad review of clinical trials found that mild anemia can occur in 100% of patients after chemotherapy, while more severe anemia can occur in up to 80% of such patients [see, e.g., Groopman et al. (1999) J Natl Cancer Inst 91: 1616-1634]. Myelosuppressive drugs include, for example: 1) alkylating agents such as nitrogen mustards (e.g., melphalan) and nitrosoureas (e.g., streptozocin); 2) antimetabolites such as folic acid antagonists (e.g., methotrexate), purine analogs (e.g., thioguanine), and pyrimidine analogs (e.g., gemcitabine); 3) cytotoxic antibiotics such as anthracyclines (e.g., doxorubicin); 4) kinase inhibitors (e.g., gefitinib); 5) mitotic inhibitors such as taxanes (e.g., paclitaxel) and vinca alkaloids (e.g., vinorelbine); 6) monoclonal antibodies (e.g., rituximab); and 7) topoisomerase inhibitors (e.g., topotecan and etoposide). In addition, conditions resulting in a hypometabolic rate can produce a mild-to-moderate hypoproliferative anemia. Among such conditions are endocrine deficiency states. For example, anemia can occur in Addison’s disease, hypothyroidism, hyperparathyroidism, or males who are castrated or treated with estrogen. In some embodiments, one or more ActRIIB proteins of the disclosure (e.g., variant ActRIIB proteins in either homomeric or heteromeric forms), optionally combined with an EPO receptor activator, could be used to treat a hyperproliferative anemia.

[0499] Chronic kidney disease is sometimes associated with hypoproliferative anemia, and the degree of the anemia varies in severity with the level of renal impairment. Such anemia is primarily due to inadequate production of erythropoietin and reduced survival of red blood cells. Chronic kidney disease usually proceeds gradually over a period of years or decades to end-stage (Stage-5) disease, at which point dialysis or kidney transplantation is required for patient survival. Anemia often develops early in this process and worsens as disease progresses. The clinical consequences of anemia of kidney disease are well-documented and include development of left ventricular hypertrophy, impaired cognitive function, reduced quality of life, and altered immune function [see, e.g., Levin et al. (1999) Am J Kidney Dis 27:347-354; Nissenson (1992) Am J Kidney Dis 20(Suppl 1):21-24; Revicki et al. (1995) Am J Kidney Dis 25:548-554; Gafter et al., (1994) Kidney Int 45:224-231]. In some embodiments, one or more ActRIIB proteins (e.g., variant ActRIIB proteins in either homomeric or heteromeric forms), optionally combined with an EPO receptor activator, could be used to treat anemia associated with acute or chronic renal disease or failure.

[0500] Anemia resulting from acute blood loss of sufficient volume, such as from trauma or postpartum hemorrhage, is known as acute post-hemorrhagic anemia. Acute blood loss initially causes hypovolemia without anemia since there is proportional depletion of RBCs along with other blood constituents. However, hypovolemia will rapidly trigger physiologic mechanisms that shift fluid from the extravascular to the vascular compartment, which results in hemodilution and anemia. If chronic, blood loss gradually depletes body iron stores and eventually leads to iron deficiency. In some embodiments, one or more ActRIIB proteins (e.g., variant ActRIIB proteins in either homomeric or heteromeric forms), optionally combined with an EPO receptor activator, could be used to treat anemia resulting from acute blood loss.

[0501] Iron-deficiency anemia is the final stage in a graded progression of increasing iron deficiency which includes negative iron balance and iron-deficient erythropoiesis as intermediate stages. Iron deficiency can result from increased iron demand, decreased iron intake, or increased iron loss, as exemplified in conditions such as pregnancy, inadequate diet, intestinal malabsorption, acute or chronic inflammation, and acute or chronic blood loss. With mild-to-moderate anemia of this type, the bone marrow remains hypoproliferative, and RBC morphology is largely normal; however, even mild anemia can result in some microcytic hypochromic RBCs, and the transition to severe iron-deficient anemia is accompanied by hyperproliferation of the bone marrow and increasingly prevalent microcytic and hypochromic RBCs [see, e.g., Adamson (2008) Harrison’s Principles of Internal Medicine, 17th ed.; McGraw Hill, New York, pp 628-634]. Appropriate therapy for iron-deficiency anemia depends on its cause and severity, with oral iron preparations, parenteral iron formulations, and RBC transfusion as major conventional options. In some embodiments, one or more ActRIIB proteins of the disclosure (e.g., variant ActRIIB proteins in either homomeric or heteromeric forms), optionally combined with an EPO receptor activator, could be used to treat a chronic iron-deficiency.

[0502] Myelodysplastic syndrome (MDS) is a diverse collection of hematological conditions characterized by ineffective production of myeloid blood cells and risk of transformation to acute myelogenous leukemia. In MDS patients, blood stem cells do not mature into healthy red blood cells, white blood cells, or platelets. MDS disorders include, for example, refractory anemia, refractory anemia with ringed sideroblasts, refractory anemia with excess blasts, refractory anemia with excess blasts in transformation, refractory cytopenia with multilineage dysplasia, and myelodysplastic syndrome associated with an isolated 5q chromosome abnormality. As these disorders manifest as irreversible defects in both quantity and quality of hematopoietic cells, most MDS patients are afflicted with chronic anemia. Therefore, MDS patients eventually require blood transfusions and/or treatment with growth factors (e.g., erythropoietin or G-CSF) to increase red blood cell levels. However, many MDS patients develop side-effects due to frequency of such therapies. For example, patients who receive frequent red blood cell transfusion can exhibit tissue and organ damage from the buildup of extra iron. Accordingly, one or more ActRIIB proteins of the disclosure (e.g., variant ActRIIB proteins in either homomeric or heteromeric forms), may be used to treat patients having MDS. In certain embodiments, patients suffering from MDS may be treated using one or more ActRIIB proteins of the disclosure (e.g., variant ActRIIB proteins in either homomeric or heteromeric forms), optionally in combination with an EPO receptor activator. In other embodiments, a patient suffering from MDS may be treated using a combination of one or more ActRIIB proteins of the disclosure (e.g., variant ActRIIB proteins in either homomeric or heteromeric forms) and one or more additional therapeutic agents for treating MDS including, for example, thalidomide, lenalidomide, azacitadine, decitabine, erythropoietins, deferoxamine, antithymocyte globulin, and filgrastim (G-CSF).

[0503] Originally distinguished from aplastic anemia, hemorrhage, or peripheral hemolysis on the basis of ferrokinetic studies [see, e.g., Ricketts et al. (1978) Clin Nucl Med 3:159-164], ineffective erythropoiesis describes a diverse group of anemias in which production of mature RBCs is less than would be expected given the number of erythroid precursors (erythroblasts) present in the bone marrow [Tanno et al. (2010) Adv Hematol 2010:358283]. In such anemias, tissue hypoxia persists despite elevated erythropoietin levels due to ineffective production of mature RBCs. A vicious cycle eventually develops in which elevated erythropoietin levels drive massive expansion of erythroblasts, potentially leading to splenomegaly (spleen enlargement) due to extramedullary erythropoiesis [see, e.g., Aizawa et al. (2003) Am J Hematol 74:68-72], erythroblast-induced bone pathology [see, e.g., Di Matteo et al. (2008) J Biol Regul Homeost Agents 22:211-216], and tissue iron overload, even in the absence of therapeutic RBC transfusions [see, e.g., Pippard et al. (1979) Lancet 2:819-821]. Thus, by boosting erythropoietic effectiveness, an ActRIIB protein of the present disclosure (e.g., variant ActRIIB proteins in either homomeric or heteromeric forms) may break the aforementioned cycle and thus alleviate not only the underlying anemia but also the associated complications of elevated erythropoietin levels, splenomegaly, bone pathology, and tissue iron overload. In some embodiments, one or more ActRIIB proteins (e.g., variant ActRIIB proteins in either homomeric or heteromeric forms) can be used to treat or prevent ineffective erythropoiesis, including anemia and elevated EPO levels as well as complications such as splenomegaly, erythroblast-induced bone pathology, iron overload, and their attendant pathologies. With splenomegaly, such pathologies include thoracic or abdominal pain and reticuloendothelial hyperplasia. Extramedullary hematopoiesis can occur not only in the spleen but potentially in other tissues in the form of extramedullary hematopoietic pseudotumors [see, e.g., Musallam et al. (2012) Cold Spring Harb Perspect Med 2:a013482]. With erythroblast-induced bone pathology, attendant pathologies include low bone mineral density, osteoporosis, and bone pain [see, e.g., Haidar et al. (2011) Bone 48:425-432]. With iron overload, attendant pathologies include hepcidin suppression and hyperabsorption of dietary iron [see, e.g., Musallam et al. (2012) Blood Rev 26(Suppl 1):S16-S19], multiple endocrinopathies and liver fibrosis/cirrhosis [see, e.g., Galanello et al. (2010) Orphanet J Rare Dis 5:11], and iron-overload cardiomyopathy [Lekawanvijit et al., 2009, Can J Cardiol 25:213-218].

[0504] The most common causes of ineffective erythropoiesis are the thalassemia syndromes, hereditary hemoglobinopathies in which imbalances in the production of intact alpha- and beta-hemoglobin chains lead to increased apoptosis during erythroblast maturation [see, e.g., Schrier (2002) Curr Opin Hematol 9:123-126]. Thalassemias are collectively among the most frequent genetic disorders worldwide, with changing epidemiologic patterns predicted to contribute to a growing public health problem in both the U.S. and globally [Vichinsky (2005) Ann NY Acad Sci 1054:18-24]. Thalassemia syndromes are named according to their severity. Thus, α-thalassemias include α-thalassemia minor (also known as α-thalassemia trait; two affected α-globin genes), hemoglobin H disease (three affected α-globin genes), and α-thalassemia major (also known as hydrops fetalis; four affected α-globin genes). β-Thalassemias include (β-thalassemia minor (also known as (β-thalassemia trait; one affected β-globin gene), (β-thalassemia intermedia (two affected β-globin genes), hemoglobin E thalassemia (two affected β-globin genes), and (β-thalassemia major (also known as Cooley’s anemia; two affected β-globin genes resulting in a complete absence of β-globin protein). β-Thalassemia impacts multiple organs, is associated with considerable morbidity and mortality, and currently requires life-long care. Although life expectancy in patients with β-thalassemia has increased in recent years due to use of regular blood transfusions in combination with iron chelation, iron overload resulting both from transfusions and from excessive gastrointestinal absorption of iron can cause serious complications such as heart disease, thrombosis, hypogonadism, hypothyroidism, diabetes, osteoporosis, and osteopenia [see, e.g., Rund et al. (2005) N Engl J Med 353:1135-1146]. In certain embodiments, one or more ActRIIB proteins of the disclosure (e.g., variant ActRIIB proteins in either homomeric or heteromeric forms), optionally combined with an EPO receptor activator, can be used to treat or prevent a thalassemia syndrome.

[0505] In some embodiments, one or more ActRIIB proteins of the disclosure (e.g., variant ActRIIB proteins in either homomeric or heteromeric forms), optionally combined with an EPO receptor activator, can be used for treating disorders of ineffective erythropoiesis besides thalassemia syndromes. Such disorders include sideroblastic anemia (inherited or acquired); dyserythropoietic anemia (types I and II); sickle cell anemia; hereditary spherocytosis; pyruvate kinase deficiency; megaloblastic anemias, potentially caused by conditions such as folate deficiency (due to congenital diseases, decreased intake, or increased requirements), cobalamin deficiency (due to congenital diseases, pernicious anemia, impaired absorption, pancreatic insufficiency, or decreased intake), certain drugs, or unexplained causes (congenital dyserythropoietic anemia, refractory megaloblastic anemia, or erythroleukemia); myelophthisic anemias including, for example, myelofibrosis (myeloid metaplasia) and myelophthisis; congenital erythropoietic porphyria; and lead poisoning. In particular embodiments, one or more ActRIIB proteins of the disclosure (e.g., variant ActRIIB proteins in either homomeric or heteromeric forms) may be used to treat myelofibrosis.

[0506] In certain embodiments, one or more ActRIIB proteins of the disclosure (e.g., variant ActRIIB proteins in either homomeric or heteromeric forms) may be used in combination with supportive therapies for ineffective erythropoiesis. Such therapies include transfusion with either red blood cells or whole blood to treat anemia. In chronic or hereditary anemias, normal mechanisms for iron homeostasis are overwhelmed by repeated transfusions, eventually leading to toxic and potentially fatal accumulation of iron in vital tissues such as heart, liver, and endocrine glands. Thus, supportive therapies for patients chronically afflicted with ineffective erythropoiesis also include treatment with one or more iron-chelating molecules to promote iron excretion in the urine and/or stool and thereby prevent, or reverse, tissue iron overload [see, e.g., Hershko (2006) Haematologica 91:1307-1312; Cao et al. (2011), Pediatr Rep 3(2):e17]. Effective iron-chelating agents should be able to selectively bind and neutralize ferric iron, the oxidized form of non-transferrin bound iron which likely accounts for most iron toxicity through catalytic production of hydroxyl radicals and oxidation products [see, e.g., Esposito et al. (2003) Blood 102:2670-2677]. These agents are structurally diverse, but all possess oxygen or nitrogen donor atoms able to form neutralizing octahedral coordination complexes with individual iron atoms in stoichiometries of 1:1 (hexadentate agents), 2:1 (tridentate), or 3:1 (bidentate) [Kalinowski et al. (2005) Pharmacol Rev 57:547-583]. In general, effective iron-chelating agents also are relatively low molecular weight (e.g., less than 700 daltons), with solubility in both water and lipids to enable access to affected tissues. Specific examples of iron-chelating molecules include deferoxamine, a hexadentate agent of bacterial origin requiring daily parenteral administration, and the orally active synthetic agents deferiprone (bidentate) and deferasirox (tridentate). Combination therapy consisting of same-day administration of two iron-chelating agents shows promise in patients unresponsive to chelation monotherapy and also in overcoming issues of poor patient compliance with dereroxamine alone [Cao et al. (2011) Pediatr Rep 3(2):e17; Galanello et al. (2010) Ann NY Acad Sci 1202:79-86].

[0507] In certain embodiments, one or more ActRIIB proteins of the disclosure (e.g., variant ActRIIB proteins in either homomeric or heteromeric forms) may be used in combination with hepcidin or a hepcidin agonist for ineffective erythropoiesis. A circulating polypeptide produced mainly in the liver, hepcidin is considered a master regulator of iron metabolism by virtue of its ability to induce the degradation of ferroportin, an iron-export protein localized on absorptive enterocytes, hepatocytes, and macrophages. Broadly speaking, hepcidin reduces availability of extracellular iron, so hepcidin agonists may be beneficial in the treatment of ineffective erythropoiesis [see, e.g., Nemeth (2010) Adv Hematol 2010:750643]. This view is supported by beneficial effects of increased hepcidin expression in a mouse model of β-thalassemia [Gardenghi et al. (2010) J Clin Invest 120:4466-4477].

[0508] One or more ActRIIB proteins of the disclosure (e.g., variant ActRIIB proteins in either homomeric or heteromeric forms), optionally combined with an EPO receptor activator, would also be appropriate for treating anemias of disordered RBC maturation, which are characterized in part by undersized (microcytic), oversized (macrocytic), misshapen, or abnormally colored (hypochromic) RBCs.

[0509] In certain embodiments, the present disclosure provides methods of treating or preventing anemia in an individual in need thereof by administering to the individual a therapeutically effective amount of one or more ActRIIB proteins of the disclosure (e.g., variant ActRIIB proteins in either homomeric or heteromeric forms) and an EPO receptor activator. In certain embodiments, one or more ActRIIB proteins of the disclosure (e.g., variant ActRIIB proteins in either homomeric or heteromeric forms) may be used in combination with EPO receptor activators to reduce the required dose of these activators in patients that are susceptible to adverse effects of EPO. These methods may be used for therapeutic and prophylactic treatments of a patient.

[0510] One or more ActRIIB proteins of the disclosure (e.g., variant ActRIIB proteins in either homomeric or heteromeric forms) may be used in combination with EPO receptor activators to achieve an increase in red blood cells, particularly at lower dose ranges of EPO receptor activators. This may be beneficial in reducing the known off-target effects and risks associated with high doses of EPO receptor activators. The primary adverse effects of EPO include, for example, an excessive increase in the hematocrit or hemoglobin levels and polycythemia. Elevated hematocrit levels can lead to hypertension (more particularly aggravation of hypertension) and vascular thrombosis. Other adverse effects of EPO which have been reported, some of which relate to hypertension, are headaches, influenza-like syndrome, obstruction of shunts, myocardial infarctions and cerebral convulsions due to thrombosis, hypertensive encephalopathy, and red cell blood cell aplasia. See, e.g., Singibarti (1994) J. Clin Investig 72(suppl 6), S36-S43; Horl et al. (2000) Nephrol Dial Transplant 15(suppl 4), 51-56; Delanty et al. (1997) Neurology 49, 686-689; and Bunn (2002) N Engl J Med 346(7), 522-523).

[0511] Provided that variant ActRIIB proteins of the present disclosure act by a different mechanism than EPO, these antagonists may be useful for increasing red blood cell and hemoglobin levels in patients that do not respond well to EPO. For example, an antagonist of the present disclosure may be beneficial for a patient in which administration of a normal-to-increased dose of EPO (>300 IU/kg/week) does not result in the increase of hemoglobin level up to the target level. Patients with an inadequate EPO response are found in all types of anemia, but higher numbers of non-responders have been observed particularly frequently in patients with cancers and patients with end-stage renal disease. An inadequate response to EPO can be either constitutive (observed upon the first treatment with EPO) or acquired (observed upon repeated treatment with EPO).

[0512] In certain embodiments, the present disclosure provides methods for managing a patient that has been treated with, or is a candidate to be treated with, one or more ActRIIB proteins of the disclosure (e.g., variant ActRIIB proteins in either homomeric or heteromeric forms) by measuring one or more hematologic parameters in the patient. The hematologic parameters may be used to evaluate appropriate dosing for a patient who is a candidate to be treated with the antagonist of the present disclosure, to monitor the hematologic parameters during treatment, to evaluate whether to adjust the dosage during treatment with one or more antagonist of the disclosure, and/or to evaluate an appropriate maintenance dose of one or more antagonists of the disclosure. If one or more of the hematologic parameters are outside the normal level, dosing with one or more ActRIIB proteins of the disclosure (e.g., variant ActRIIB proteins in either homomeric or heteromeric forms) may be reduced, delayed or terminated.

[0513] Hematologic parameters that may be measured in accordance with the methods provided herein include, for example, red blood cell levels, blood pressure, iron stores, and other agents found in bodily fluids that correlate with increased red blood cell levels, using art-recognized methods. Such parameters may be determined using a blood sample from a patient. Increases in red blood cell levels, hemoglobin levels, and/or hematocrit levels may cause increases in blood pressure.

[0514] In one embodiment, if one or more hematologic parameters are outside the normal range or on the high side of normal in a patient who is a candidate to be treated with one or more ActRIIB proteins of the disclosure (e.g., variant ActRIIB proteins in either homomeric or heteromeric forms), then onset of administration of the one or more variant ActRIIB proteins of the disclosure may be delayed until the hematologic parameters have returned to a normal or acceptable level either naturally or via therapeutic intervention. For example, if a candidate patient is hypertensive or pre-hypertensive, then the patient may be treated with a blood pressure lowering agent in order to reduce the patient’s blood pressure. Any blood pressure lowering agent appropriate for the individual patient’s condition may be used including, for example, diuretics, adrenergic inhibitors (including alpha blockers and beta blockers), vasodilators, calcium channel blockers, angiotensin-converting enzyme (ACE) inhibitors, or angiotensin II receptor blockers. Blood pressure may alternatively be treated using a diet and exercise regimen. Similarly, if a candidate patient has iron stores that are lower than normal, or on the low side of normal, then the patient may be treated with an appropriate regimen of diet and/or iron supplements until the patient’s iron stores have returned to a normal or acceptable level. For patients having higher than normal red blood cell levels and/or hemoglobin levels, then administration of the one or more ActRIIB proteins of the disclosure (e.g., variant ActRIIB proteins in either homomeric or heteromeric forms) may be delayed until the levels have returned to a normal or acceptable level.

[0515] In certain embodiments, if one or more hematologic parameters are outside the normal range or on the high side of normal in a patient who is a candidate to be treated with one or more ActRIIB proteins of the disclosure (e.g., variant ActRIIB proteins in either homomeric or heteromeric forms), then the onset of administration may not be delayed. However, the dosage amount or frequency of dosing of the one or more variant ActRIIB proteins of the disclosure may be set at an amount that would reduce the risk of an unacceptable increase in the hematologic parameters arising upon administration of the one or more variant ActRIIB proteins of the disclosure. Alternatively, a therapeutic regimen may be developed for the patient that combines one or more variant ActRIIB proteins of the disclosure with a therapeutic agent that addresses the undesirable level of the hematologic parameter. For example, if the patient has elevated blood pressure, then a therapeutic regimen involving administration of one or more variant ActRIIB proteins of the disclosure and a blood pressure-lowering agent may be designed. For a patient having lower than desired iron stores, a therapeutic regimen of one or more variant ActRIIB proteins and iron supplementation may be developed.

[0516] In one embodiment, baseline parameter(s) for one or more hematologic parameters may be established for a patient who is a candidate to be treated with one or more ActRIIB proteins of the disclosure (e.g., variant ActRIIB proteins in either homomeric or heteromeric forms) and an appropriate dosing regimen established for that patient based on the baseline value(s). Alternatively, established baseline parameters based on a patient’s medical history could be used to inform an appropriate antagonist-dosing regimen for a patient. For example, if a healthy patient has an established baseline blood pressure reading that is above the defined normal range it may not be necessary to bring the patient’s blood pressure into the range that is considered normal for the general population prior to treatment with the one or more antagonist of the disclosure. A patient’s baseline values for one or more hematologic parameters prior to treatment with one or more variant ActRIIB proteins of the disclosure (e.g., variant ActRIIB proteins in either homomeric or heteromeric forms) may also be used as the relevant comparative values for monitoring any changes to the hematologic parameters during treatment with the one or more antagonists of the disclosure.

[0517] In certain embodiments, one or more hematologic parameters are measured in patients who are being treated with a one or more ActRIIB proteins of the disclosure (e.g., variant ActRIIB proteins in either homomeric or heteromeric forms). The hematologic parameters may be used to monitor the patient during treatment and permit adjustment or termination of the dosing with the one or more antagonists of the disclosure or additional dosing with another therapeutic agent. For example, if administration of one or more variant ActRIIB proteins of the disclosure results in an increase in blood pressure, red blood cell level, or hemoglobin level, or a reduction in iron stores, then the dose of the one or more variant ActRIIB proteins of the disclosure may be reduced in amount or frequency in order to decrease the effects of the one or more variant ActRIIB proteins of the disclosure on the one or more hematologic parameters. If administration of one or more variant ActRIIB proteins of the disclosure results in a change in one or more hematologic parameters that is adverse to the patient, then the dosing of the one or more variant ActRIIB proteins of the disclosure may be terminated either temporarily, until the hematologic parameter(s) return to an acceptable level, or permanently. Similarly, if one or more hematologic parameters are not brought within an acceptable range after reducing the dose or frequency of administration of the one or more variant ActRIIB proteins of the disclosure, then the dosing may be terminated. As an alternative, or in addition to, reducing or terminating the dosing with the one or more variant ActRIIB proteins of the disclosure, the patient may be dosed with an additional therapeutic agent that addresses the undesirable level in the hematologic parameter(s), such as, for example, a blood pressure-lowering agent or an iron supplement. For example, if a patient being treated with one or more variant ActRIIB proteins of the disclosure has elevated blood pressure, then dosing with the one or more variant ActRIIB proteins of the disclosure may continue at the same level and a blood pressure-lowering agent is added to the treatment regimen, dosing with the one or more variant ActRIIB proteins of the disclosure may be reduced (e.g., in amount and/or frequency) and a blood pressure-lowering agent is added to the treatment regimen, or dosing with the one or more variant ActRIIB proteins of the disclosure may be terminated and the patient may be treated with a blood pressure-lowering agent.

[0518] In some embodiments, the present disclosure relates to methods of treating pulmonary hypertension (e.g., pulmonary arterial hypertension), a kidney-associated disease (e.g., Alport syndrome or focal segmental glomerulosclerosis (FSGS)), and/or an interstitial lung disease (ILD) (e.g., idiopathic pulmonary fibrosis) comprising administering to a patient in need thereof an effective amount of any of, or any combination of, one or more variant ActRIIB proteins of the present disclosure (e.g., variant ActRIIB proteins in either homomeric or heteromeric forms). In some embodiments, the patient is administered any of the variant ActRIIB polypeptides and/or fragments thereof in either homomeric or heteromeric forms disclosed herein. In some embodiments, the disclosure contemplates methods of treating one or more complications of pulmonary hypertension (e.g., smooth muscle and/or endothelial cell proliferation in the pulmonary artery, angiogenesis in the pulmonary artery, dyspnea, chest pain, pulmonary vascular remodeling, right ventricular hypertrophy, and pulmonary fibrosis) comprising administering to a patient in need thereof an effective amount of a variant ActRIIB protein in either homomeric or heteromeric form. In some embodiments, the disclosure contemplates methods of preventing one or more complications of pulmonary hypertension comprising administering to a patient in need thereof an effective amount of a variant ActRIIB protein in either homomeric or heteromeric form. In some embodiments, the disclosure contemplates methods of reducing the progression rate of pulmonary hypertension comprising administering to a patient in need thereof an effective amount of a variant ActRIIB protein in either homomeric or heteromeric form. In some embodiments, the disclosure contemplates methods of reducing the progression rate of one or more complications of pulmonary hypertension comprising administering to a patient in need thereof an effective amount of a variant ActRIIB protein in either homomeric or heteromeric form. In some embodiments, the disclosure contemplates methods of reducing the severity of pulmonary hypertension comprising administering to a patient in need thereof an effective amount of a variant ActRIIB protein in either homomeric or heteromeric form. In some embodiments, the disclosure contemplates methods of reducing the severity of one or more complications of pulmonary hypertension comprising administering to a patient in need thereof an effective amount of a variant ActRIIB protein in either homomeric or heteromeric form. Optionally, methods disclosed herein for treating, preventing, or reducing the progression rate and/or severity of pulmonary hypertension, particularly treating, preventing, or reducing the progression rate and/or severity of one or more complications of pulmonary hypertension, may further comprise administering to the patient one or more supportive therapies or additional active agents for treating pulmonary hypertension. For example, the patient also may be administered one or more supportive therapies or active agents selected from the group consisting of: prostacyclin and derivatives thereof (e.g., epoprostenol, treprostinil, and iloprost); prostacyclin receptor agonists (e.g., selexipag); endothelin receptor antagonists (e.g., thelin, ambrisentan, macitentan, and bosentan); calcium channel blockers (e.g., amlodipine, diltiazem, and nifedipine; anticoagulants (e.g., warfarin); diuretics; oxygen therapy; atrial septostomy; pulmonary thromboendarterectomy; phosphodiesterase type 5 inhibitors (e.g., sildenafil and tadalafil); activators of soluble guanylate cyclase (e.g., cinaciguat and riociguat); ASK-1 inhibitors (e.g., CIIA; SCH79797; GS-4997; MSC2032964A; 3H-naphtho[1,2,3-de]quiniline-2,7-diones, NQDI-1; 2-thioxo-thiazolidines, 5-bromo-3-(4-oxo-2-thioxo-thiazolidine-5-ylidene)-1,3-dihydro-indol-2-one); NF-_{K}B antagonists (e.g., dh404, CDDO-epoxide; 2.2-difluoropropionamide; C28 imidazole (CDDO-Im); 2-cyano-3,12-dioxoolean-1,9-dien-28-oic acid (CDDO); 3-Acetyloleanolic Acid; 3-Triflouroacetyloleanolic Acid; 28-Methyl-3-acetyloleanane; 28-Methyl-3-trifluoroacetyloleanane; 28-Methyloxyoleanolic Acid; SZC014; SCZ015; SZC017; PEGylated derivatives of oleanolic acid; 3-O-(beta-D-glucopyranosyl) oleanolic acid; 3-O-[beta-D-glucopyranosyl-(1-->3)-beta-D-glucopyranosyl] oleanolic acid; 3-O-[beta-D-glucopyranosyl-(1-->2)-beta-D-glucopyranosyl] oleanolic acid; 3-O-[beta-D-glucopyranosyl-(1-->3)-beta-D-glucopyranosyl] oleanolic acid 28-O-beta-D-glucopyranosyl ester; 3-O-[beta-D-glucopyranosyl-(1-->2)-beta-D-glucopyranosyl] oleanolic acid 28-O-beta-D-glucopyranosyl ester; 3-0-[a-L-rhamnopyranosyl-(1-->3)-beta-D-glucuronopyranosyl] oleanolic acid; 3-O-[alpha-L-rhamnopyranosyl-(1-->3)-beta-D-glucuronopyranosyl] oleanolic acid 28-O-beta-D-glucopyranosyl ester; 28-O-β-D-glucopyranosyl-oleanolic acid; 3-O-β-D-glucopyranosyl (1—>-3)-β-D-glucopyranosiduronic acid (CS1); oleanolic acid 3-O-β-D-glucopyranosyl (1—>-3)-β-D-glucopyranosiduronic acid (CS2); methyl 3,11-dioxoolean-12-en-28-olate (DIOXOL); ZCVI₄-2; Benzyl 3-dehydr-oxy-1,2,5-oxadiazolo[3′,4′:2,3]oleanolate) lung and/or heart transplantation

[0519] In some embodiments, the present disclosure relates to methods of treating an interstitial lung disease (e.g., idiopathic pulmonary fibrosis) comprising administering to a patient in need thereof an effective amount of any of the variant ActRIIB proteins in either homomeric or heteromeric form disclosed herein. In some embodiments, the patient is administered any of the ActRIIB polypeptides or variants and/or fragments thereof in either homomeric or heteromeric form disclosed herein. In some embodiments, the interstitial lung disease is pulmonary fibrosis. In some embodiments, the interstitial lung disease is caused by any one of the following: silicosis, asbestosis, berylliosis, hypersensitivity pneumonitis, drug use (e.g., antibiotics, chemotherapeutic drugs, antiarrhythmic agents, statins), systemic sclerosis, polymyositis, dermatomyositis, systemic lupus erythematosus, rheumatoid arthritis, an infection (e.g., atypical pneumonia, pneumocystis pneumonia, tuberculosis, chlamydia trachomatis, and/or respiratory syncytial virus), lymphangitic carcinomatosis, cigarette smoking, or developmental disorders. In some embodiments, the interstitial lung disease is idiopathic (e.g., sarcoidosis, idiopathic pulmonary fibrosis, Hamman-Rich syndrome, and/or antisynthetase syndrome). In particular embodiments, the interstitial lung disease is idiopathic pulmonary fibrosis (IPF). In some embodiments, the treatment for idiopathic pulmonary fibrosis is administered in combination with an additional therapeutic agent. In some embodiments, the additional therapeutic agent is selected from the group consisting of: pirfenidone, N-acetylcysteine, prednisone, azathioprine, nintedanib, derivatives thereof and combinations thereof.

[0520] Pulmonary hypertension (PH) has been previously classified as primary (idiopathic) or secondary. Recently, the World Health Organization (WHO) has classified pulmonary hypertension into five groups: Group 1: pulmonary arterial hypertension (PAH); Group 2: pulmonary hypertension with left heart disease; Group 3: pulmonary hypertension with lung disease and/or hypoxemia; Group 4: pulmonary hypertension due to chronic thrombotic and/or embolic disease; and Group 5: miscellaneous conditions (e.g., sarcoidosis, histiocytosis X, lymphangiomatosis and compression of pulmonary vessels). See, for example, Rubin (2004) Chest 126:7-10.

[0521] In certain aspects, the disclosure relates to methods of treating, preventing, or reducing the progression rate and/or severity of pulmonary hypertension (e.g., treating, preventing, or reducing the progression rate and/or severity of one or more complications of pulmonary hypertension) comprising administering to a patient in need thereof an effective amount of a variant ActRIIB protein in either homomeric or heteromeric form. In some embodiments, the patient is administered any of the ActRIIB polypeptides or variants and/or fragments thereof in either homomeric or heteromeric form disclosed herein. In some embodiments, the method relates to pulmonary hypertension patients that have pulmonary arterial hypertension. In some embodiments, the method relates pulmonary hypertension patients that have pulmonary hypertension with left heart disease. In some embodiments, the method relates to pulmonary hypertension patients that have lung disease and/or hypoxemia. In some embodiments, the method relates to pulmonary hypertension patients that have chronic thrombotic and/or embolic disease. In some embodiments, the method relates to pulmonary hypertension patients that have sarcoidosis, histiocytosis X, or lymphangiomatosis and compression of pulmonary vessels.

[0522] Pulmonary arterial hypertension is a serious, progressive and life-threatening disease of the pulmonary vasculature, characterized by profound vasoconstriction and an abnormal proliferation of smooth muscle cells in the walls of the pulmonary arteries. Severe constriction of the blood vessels in the lungs leads to very high pulmonary arterial pressures. These high pressures make it difficult for the heart to pump blood through the lungs to be oxygenated. Patients with PAH suffer from extreme shortness of breath as the heart struggles to pump against these high pressures. Patients with PAH typically develop significant increases in pulmonary vascular resistance (PVR) and sustained elevations in pulmonary artery pressure (PAP), which ultimately lead to right ventricular failure and death. Patients diagnosed with PAH have a poor prognosis and equally compromised quality of life, with a mean life expectancy of 2 to 5 years from the time of diagnosis if untreated.

[0523] A variety of factors contribute to the pathogenesis of pulmonary hypertension including proliferation of pulmonary cells which can contribute to vascular remodeling (i.e., hyperplasia). For example, pulmonary vascular remodeling occurs primarily by proliferation of arterial endothelial cells and smooth muscle cells of patients with pulmonary hypertension. Overexpression of various cytokines is believed to promote pulmonary hypertension. Further, it has been found that pulmonary hypertension may rise from the hyperproliferation of pulmonary arterial smooth cells and pulmonary endothelial cells. Still further, advanced PAH may be characterized by muscularization of distal pulmonary arterioles, concentric intimal thickening, and obstruction of the vascular lumen by proliferating endothelial cells. Pietra et al., J. Am. Coll. Cardiol., 43:255-325 (2004).

[0524] In certain aspects, the disclosure relates to methods of treating, preventing, or reducing the progression rate and/or severity of pulmonary hypertension (e.g., treating, preventing, or reducing the progression rate and/or severity of one or more complications of pulmonary hypertension) comprising administering to a patient in need thereof an effective amount of a variant ActRIIB protein in either homomeric or heteromeric form, wherein the patient has resting pulmonary arterial pressure (PAP) of at least 25 mm Hg (e.g., 25, 30, 35, 40, 45, or 50 mm Hg). In some embodiments, the patient is administered any of the ActRIIB polypeptides or variants and/or fragments thereof in either homomeric or heteromeric form disclosed herein. In some embodiments, the method relates to patients having a resting PAP of at least 25 mm Hg. In some embodiments, the method relates to patients having a resting PAP of at least 30 mm Hg. In some embodiments, the method relates to patients having a resting PAP of at least 35 mm Hg. In some embodiments, the method relates to patients having a resting PAP of at least 40 mm Hg. In some embodiments, the method relates to patients having a resting PAP of at least 45 mm Hg. In some embodiments, the method relates to patients having a resting PAP of at least 50 mm Hg.

[0525] In some embodiments, the disclosure relates to methods of adjusting one or more hemodynamic parameters in the PH patient toward a more normal level (e.g., normal as compared to healthy people of similar age and sex), comprising administering to a patient in need thereof an effective amount of a variant ActRIIB protein in either homomeric or heteromeric form. In some embodiments, the patient is administered any of the ActRIIB polypeptides or variants and/or fragments thereof in either homomeric or heteromeric form disclosed herein. In some embodiments, the method relates to reducing PAP. In some embodiments, the method relates to reducing the patient’s PAP by at least 3 mmHg. In certain embodiments, the method relates to reducing the patient’s PAP by at least 5 mmHg. In certain embodiments, the method relates to reducing the patient’s PAP by at least 7 mmHg. In certain embodiments, the method relates to reducing the patient’s PAP by at least 10 mmHg. In certain embodiments, the method relates to reducing the patient’s PAP by at least 12 mmHg. In certain embodiments, the method relates to reducing the patient’s PAP by at least 15 mmHg. In certain embodiments, the method relates to reducing the patient’s PAP by at least 20 mmHg. In certain embodiments, the method relates to reducing the patient’s PAP by at least 25 mmHg. In some embodiments, the method relates to reducing pulmonary vascular resistance (PVR). In some embodiments, the method relate to increasing pulmonary capillary wedge pressure (PCWP). In some embodiments, the method relate to increasing left ventricular end-diastolic pressure (LVEDP).

[0526] In certain aspects, the disclosure relates to methods of treating, preventing, or reducing the progression rate and/or severity of one or more complications of pulmonary hypertension comprising administering to a patient in need thereof an effective amount of a variant ActRIIB protein in either homomeric or heteromeric form. In some embodiments, the method relates to treating, preventing, or reducing the progression rate and/or severity of cell proliferation in the pulmonary artery of a pulmonary hypertension patient. In some embodiments, the patient is administered any of the ActRIIB polypeptides or variants and/or fragments thereof in either homomeric or heteromeric form disclosed herein. In some embodiments, the method relates to treating, preventing, or reducing the progression rate and/or severity of smooth muscle and/or endothelial cells proliferation in the pulmonary artery of a pulmonary hypertension patient. In some embodiments, the method relates to treating, preventing, or reducing the progression rate and/or severity of angiogenesis in the pulmonary artery of a pulmonary hypertension patient. In some embodiments, the method relates to increasing physical activity of a patient having pulmonary hypertension. In some embodiments, the method relates to treating, preventing, or reducing the progression rate and/or severity of dyspnea in a pulmonary hypertension patient. In some embodiments, the method relates to treating, preventing, or reducing the progression rate and/or severity of chest pain in a pulmonary hypertension patient. In some embodiments, the method relates to treating, preventing, or reducing the progression rate and/or severity of fatigue in a pulmonary hypertension patient. In some embodiments, the method relates to treating, preventing, or reducing the progression rate and/or severity of pulmonary fibrosis in a pulmonary hypertension patient. In some embodiments, the method relates to treating, preventing, or reducing the progression rate and/or severity of fibrosis in a pulmonary hypertension patient. In some embodiments, the method relates to treating, preventing, or reducing the progression rate and/or severity of pulmonary vascular remodeling in a pulmonary hypertension patient. In some embodiments, the method relates to treating, preventing, or reducing the progression rate and/or severity of right ventricular hypertrophy in a pulmonary hypertension patient.

[0527] In certain aspects, the disclosure relates to methods of increasing exercise capacity in a patient having pulmonary hypertension comprising administering to a patient in need thereof an effective amount of a variant ActRIIB protein in either homomeric or heteromeric form. In some embodiments, the patient is administered any of the ActRIIB polypeptides or variants and/or fragments thereof in either homomeric or heteromeric form disclosed herein. Any suitable measure of exercise capacity can be used. For example, exercise capacity in a 6-minute walk test (6MWT), which measures how far the subject can walk in 6 minutes, i.e., the 6-minute walk distance (6MWD), is frequently used to assess pulmonary hypertension severity and disease progression. The Borg dyspnea index (BDI) is a numerical scale for assessing perceived dyspnea (breathing discomfort). It measures the degree of breathlessness, for example, after completion of the 6MWT, where a BDI of 0 indicates no breathlessness and 10 indicates maximum breathlessness. In some embodiments, the method relates to increasing 6MWD by at least 10 meters in the patient having pulmonary hypertension. In some embodiments, the method relates to increasing 6MWD by at least 20 meters in the patient having pulmonary hypertension. In some embodiments, the method relates to increasing 6MWD by at least 30 meters in the patient having pulmonary hypertension. In some embodiments, the method relates to increasing 6MWD by at least 40 meters in the patient having pulmonary hypertension. In some embodiments, the method relates to increasing 6MWD by at least 50 meters in the patient having pulmonary hypertension. In some embodiments, the method relates to increasing 6MWD by at least 60 meters in the patient having pulmonary hypertension. In some embodiments, the method relates to increasing 6MWD by at least 70 meters in the patient having pulmonary hypertension. In some embodiments, the method relates to increasing 6MWD by at least 80 meters in the patient having pulmonary hypertension. In some embodiments, the method relates to increasing 6MWD by at least 90 meters in the patient having pulmonary hypertension. In some embodiments, the method relates to increasing 6MWD by at least 100 meters in the patient having pulmonary hypertension. In some embodiments, the method relate to lowering BDI by at least 0.5 index points in the patient having pulmonary hypertension. In some embodiments, the method relate to lowering BDI by at least 1 index points in the patient having pulmonary hypertension. In some embodiments, the method relate to lowering BDI by at least 1.5 index points in the patient having pulmonary hypertension. In some embodiments, the method relate to lowering BDI by at least 2 index points in the patient having pulmonary hypertension. In some embodiments, the method relate to lowering BDI by at least 2.5 index points in the patient having pulmonary hypertension. In some embodiments, the method relate to lowering BDI by at least 3 index points in the patient having pulmonary hypertension. In some embodiments, the method relate to lowering BDI by at least 3.5 index points in the patient having pulmonary hypertension. In some embodiments, the method relate to lowering BDI by at least 4 index points in the patient having pulmonary hypertension. In some embodiments, the method relate to lowering BDI by at least 4.5 index points in the patient having pulmonary hypertension. In some embodiments, the method relate to lowering BDI by at least 5 index points in the patient having pulmonary hypertension. In some embodiments, the method relate to lowering BDI by at least 5.5 index points in the patient having pulmonary hypertension. In some embodiments, the method relate to lowering BDI by at least 6 index points in the patient having pulmonary hypertension. In some embodiments, the method relate to lowering BDI by at least 6.5 index points in the patient having pulmonary hypertension. In some embodiments, the method relate to lowering BDI by at least 7 index points in the patient having pulmonary hypertension. In some embodiments, the method relate to lowering BDI by at least 7.5 index points in the patient having pulmonary hypertension. In some embodiments, the method relate to lowering BDI by at least 8 index points in the patient having pulmonary hypertension. In some embodiments, the method relate to lowering BDI by at least 8.5 index points in the patient having pulmonary hypertension. In some embodiments, the method relate to lowering BDI by at least 9 index points in the patient having pulmonary hypertension. In some embodiments, the method relate to lowering BDI by at least 9.5 index points in the patient having pulmonary hypertension. In some embodiments, the method relate to lowering BDI by at least 3 index points in the patient having pulmonary hypertension. In some embodiments, the method relate to lowering BDI by 10 index points in the patient having pulmonary hypertension.

[0528] Pulmonary hypertension at baseline can be mild, moderate or severe, as measured for example by World Health Organization (WHO) functional class, which is a measure of disease severity in patients with pulmonary hypertension. The WHO functional classification is an adaptation of the New York Heart Association (NYHA) system and is routinely used to qualitatively assess activity tolerance, for example in monitoring disease progression and response to treatment (Rubin (2004) Chest 126:7-10). Four functional classes are recognized in the WHO system: Class I: pulmonary hypertension without resulting limitation of physical activity; ordinary physical activity does not cause undue dyspnea or fatigue, chest pain or near syncope; Class II: pulmonary hypertension resulting in slight limitation of physical activity; patient comfortable at rest; ordinary physical activity causes undue dyspnea or fatigue, chest pain or near syncope; Class III: pulmonary hypertension resulting in marked limitation of physical activity; patient comfortable at rest; less than ordinary activity causes undue dyspnea or fatigue, chest pain or near syncope; Class IV: pulmonary hypertension resulting in inability to carry out any physical activity without symptoms; patient manifests signs of right-heart failure; dyspnea and/or fatigue may be present even at rest; discomfort is increased by any physical activity.

[0529] In certain aspects, the disclosure relates to methods of treating, preventing, or reducing the progression rate and/or severity of pulmonary hypertension (e.g., treating, preventing, or reducing the progression rate and/or severity of one or more complications of pulmonary hypertension) comprising administering to a patient in need thereof a variant ActRIIB protein in either homomeric or heteromeric form, wherein the patient has Class I, Class II, Class III, or Class IV pulmonary hypertension as recognized by the WHO. In some embodiments, the patient is administered any of the ActRIIB polypeptides or variants and/or fragments thereof in either homomeric or heteromeric form disclosed herein. In some embodiments, the method relates to a patient that has Class I pulmonary hypertension as recognized by the WHO. In some embodiments, the method relates to a patient that has Class II pulmonary hypertension as recognized by the WHO. In some embodiments, the method relates to preventing or delaying patient progression from Class I pulmonary hypertension to Class II pulmonary hypertension as recognized by the WHO. In some embodiments, the method relates to promoting or increasing patient regression from Class II pulmonary hypertension to Class I pulmonary hypertension as recognized by the WHO. In some embodiments, the method relates to a patient that has Class III pulmonary hypertension as recognized by the WHO. In some embodiments, the method relates to preventing or delaying patient progression from Class II pulmonary hypertension to Class III pulmonary hypertension as recognized by the WHO. In some embodiments, the method relates to promoting or increasing patient regression from Class III pulmonary hypertension to Class II pulmonary hypertension as recognized by the WHO. In some embodiments, the method relates to promoting or increasing patient regression from Class III pulmonary hypertension to Class I pulmonary hypertension as recognized by the WHO. In some embodiments, the method relates to a patient that has Class IV pulmonary hypertension as recognized by the WHO. In some embodiments, the method relates to preventing or delaying patient progression from Class III pulmonary hypertension to Class IV pulmonary hypertension as recognized by the WHO. In some embodiments, the method relates to promoting or increasing patient regression from Class IV pulmonary hypertension to Class III pulmonary hypertension as recognized by the WHO. In some embodiments, the method relates to promoting or increasing patient regression from Class IV pulmonary hypertension to Class II pulmonary hypertension as recognized by the WHO. In some embodiments, the method relates to promoting or increasing patient regression from Class IV pulmonary hypertension to Class I pulmonary hypertension as recognized by the WHO.

[0530] There is no known cure for pulmonary hypertension; current methods of treatment focus on prolonging patient lifespan and enhancing patient quality of life. Current methods of treatment of pulmonary hypertension include administration of: vasodilators such as prostacyclin, epoprostenol, and sildenafil; endothelin receptor antagonists such as bosentan; calcium channel blockers such as amlodipine, diltiazem, and nifedipine; anticoagulants such as warfarin; and diuretics. Treatment of pulmonary hypertension has also been carried out using oxygen therapy, atrial septostomy, pulmonary thromboendarterectomy, and lung and/or heart transplantation. Each of these methods, however, suffers from one or multiple drawbacks which may include lack of effectiveness, serious side effects, low patient compliance, and high cost. In certain aspects, the method relate to treating, preventing, or reducing the progression rate and/or severity of pulmonary hypertension (e.g., treating, preventing, or reducing the progression rate and/or severity of one or more complications of pulmonary hypertension) comprising administering to a patient in need thereof an effective amount of a variant ActRIIB protein in either homomeric or heteromeric form disclosed herein in combination (e.g., administered at the same time or different times, but generally in such a manner as to achieve overlapping pharmacological/physiological effects) with one or more additional active agents and/or supportive therapies for treating pulmonary hypertension (e.g., vasodilators such as prostacyclin, epoprostenol, and sildenafil; endothelin receptor antagonists such as bosentan; calcium channel blockers such as amlodipine, diltiazem, and nifedipine; anticoagulants such as warfarin; diuretics; oxygen therapy; atrial septostomy; pulmonary thromboendarterectomy: and lung and/or heart transplantation); bardoxolone methyl or a derivative thereof; oleanolic acid or derivative thereof.

[0531] In part, the present disclosure relates to methods of treating renal diseases or conditions (e.g., Alport syndrome, focal segmental glomerulosclerosis (FSGS), polycystic kidney diseases, chronic kidney disease), comprising administering to a patient in need thereof an effective amount of a variant ActRIIB polypeptide (e.g., a variant ActRIIB homomultimer protein or a variant ActRIIB heteromultimer protein) of the present disclosure, that can be used to treat or prevent a disease or condition that is associated with abnormal activity of a ActRIIA or ActRIIB polypeptide, and/or an ActRIIA or ActRIIB ligand (e.g., Activin A, activin B, GDF11, GDF8, GDF3, BMP5, BMP6, and BMP10).

[0532] The terms “renal” and “kidney” are used interchangeably herein.

[0533] In some embodiments, any of the variant ActRIIB polypeptides in either homomeric or heteromeric form disclosed herein may be used, alone or in combination with one or more supportive therapies or active agents, to treat, prevent, or reduce the progression rate and/or severity of a kidney-associated disease or condition. As used herein, “kidney-associated disease or condition” can refer to any disease, disorder, or condition that affects the kidneys or the renal system. Examples of kidney-associated diseases or conditions include, but are not limited to, chronic kidney diseases (or failure), acute kidney diseases (or failure), primary kidney diseases, non-diabetic kidney diseases, glomerulonephritis, interstitial nephritis, diabetic kidney diseases, diabetic nephropathy, glomerulosclerosis, rapid progressive glomerulonephritis, renal fibrosis, Alport syndrome, IDDM nephritis, mesangial proliferative glomerulonephritis, membranoproliferative glomerulonephritis, crescentic glomerulonephritis, renal interstitial fibrosis, focal segmental glomerulosclerosis (FSGS), membranous nephropathy, minimal change disease, pauci-immune rapid progressive glomerulonephritis, IgA nephropathy, polycystic kidney disease (PKD), Dent’s disease, nephrocytinosis, Heymann nephritis, autosomal dominant (adult) polycystic kidney disease (ADPKD), autosomal recessive (childhood) polycystic kidney disease (ARPKD), acquired cystic kidney disease (ACKD), polycystic kidney syndrome (PKS), acute kidney injury, nephrotic syndrome, renal ischemia, podocyte diseases or disorders, proteinuria, glomerular diseases, membranous glomerulonephritis, focal segmental glomerulonephritis, pre-eclampsia, eclampsia, kidney lesions, collagen vascular diseases, benign orthostatic (postural) proteinuria, IgM nephropathy, membranous nephropathy, sarcoidosis, diabetes mellitus, kidney damage due to drugs, Fabry’s disease, aminoaciduria, Fanconi syndrome, hypertensive nephrosclerosis, interstitial nephritis, Sickle cell disease, hemoglobinuria, myoglobinuria, Wegener’s Granulomatosis, Glycogen Storage Disease Type 1, chronic kidney disease, chronic renal failure, low Glomerular Filtration Rate (GFR), nephroangiosclerosis, lupus nephritis, ANCA-positive pauci-immune crescentic glomerulonephritis, chronic allograft nephropathy, nephrotoxicity, renal toxicity, kidney necrosis, kidney damage, glomerular and tubular injury, kidney dysfunction, nephritic syndrome, acute renal failure, chronic renal failure, proximal tubal dysfunction, acute kidney transplant rejection, chronic kidney transplant rejection, non-IgA mesangioproliferative glomerulonephritis, postinfectious glomerulonephritis, vasculitides with renal involvement of any kind, any hereditary renal disease, any interstitial nephritis, renal transplant failure, kidney cancer, kidney disease associated with other conditions (e.g., hypertension, diabetes, and autoimmune disease), Dent’s disease, nephrocytinosis, Heymann nephritis, a primary kidney disease, a collapsing glomerulopathy, a dense deposit disease, a cryoglobulinemia-associated glomerulonephritis, an Henoch-Schonlein disease, a postinfectious glomerulonephritis, a bacterial endocarditis, a microscopic polyangitis, a Churg-Strauss syndrome, an anti-GBM-antibody mediated glomerulonephritis, amyloidosis, a monoclonal immunoglobulin deposition disease, a fibrillary glomerulonephritis, an immunotactoid glomerulopathy, ischemic tubular injury, a medication-induced tubulo-interstitial nephritis, a toxic tubulo-interstitial nephritis, an infectious tubulo-interstitial nephritis, a bacterial pyelonephritis, a viral infectious tubulo-interstitial nephritis which results from a polyomavirus infection or an HIV infection, a metabolic-induced tubulo-interstitial disease, a mixed connective disease, a cast nephropathy, a crystal nephropathy which may results from urate or oxalate or drug-induced crystal deposition, an acute cellular tubulo-interstitial allograft rejection, a tumoral infiltrative disease which results from a lymphoma or a post-transplant lymphoproliferative disease, an obstructive disease of the kidney, vascular disease, a thrombotic microangiopathy, a nephroangiosclerosis, an atheroembolic disease, a mixed connective tissue disease, a polyarteritis nodosa, a calcineurin-inhibitor induced-vascular disease, an acute cellular vascular allograft rejection, an acute humoral allograft rejection, early renal function decline (ERFD), end stage renal disease (ESRD), renal vein thrombosis, acute tubular necrosis, acute interstitial nephritis, established chronic kidney disease, renal artery stenosis, ischemic nephropathy, uremia, drug and toxin-induced chronic tubulointerstitial nephritis, reflux nephropathy, kidney stones, Goodpasture’s syndrome, normocytic normochromic anemia, renal anemia, diabetic chronic kidney disease, IgG4-related disease, von Hippel-Lindau syndrome, tuberous sclerosis, nephronophthisis, medullary cystic kidney disease, renal cell carcinoma, adenocarcinoma, nephroblastoma, lymphoma, leukemia, hyposialylation disorder, chronic cyclosporine nephropathy, renal reperfusion injury, renal dysplasia, azotemia, bilateral arterial occlusion, acute uric acid nephropathy, hypovolemia, acute bilateral obstructive uropathy, hypercalcemic nephropathy, hemolytic uremic syndrome, acute urinary retention, malignant nephrosclerosis, postpartum glomerulosclerosis, scleroderma, non-Goodpasture’s anti-GBM disease, microscopic polyarteritis nodosa, allergic granulomatosis, acute radiation nephritis, post-streptococcal glomerulonephritis, Waldenstrom’s macroglobulinemia, analgesic nephropathy, arteriovenous fistula, arteriovenous graft, dialysis, ectopic kidney, medullary sponge kidney, renal osteodystrophy, solitary kidney, hydronephrosis, microalbuminuria, uremia, haematuria, hyperlipidemia, hypoalbuminaemia, lipiduria, acidosis, hyperkalemia, and edema.

[0534] In some embodiments, the disclosure contemplates methods of treating one or more complications of a renal disease or condition comprising administering to a subject in need thereof an effective amount of a variant ActRIIB polypeptide (e.g., a variant ActRIIB homomultimer protein or a variant ActRIIB heteromultimer protein). In some embodiments, the disclosure contemplates methods of preventing one or more complications of a renal disease or condition comprising administering to a subject in need thereof an effective amount of a variant ActRIIB polypeptide (e.g., a variant ActRIIB homomultimer protein or a variant ActRIIB heteromultimer protein). In some embodiments, the disclosure contemplates methods of reducing the progression rate of a renal disease or condition comprising administering to a subject in need thereof an effective amount of a variant ActRIIB polypeptide (e.g., a variant ActRIIB homomultimer protein or a variant ActRIIB heteromultimer protein). In some embodiments, the disclosure contemplates methods of reducing the progression rate of one or more complications of a renal disease or condition comprising administering to a subject in need thereof an effective amount of a variant ActRIIB polypeptide (e.g., a variant ActRIIB homomultimer protein or a variant ActRIIB heteromultimer protein). In some embodiments, the disclosure contemplates methods of reducing the severity of a renal disease or condition comprising administering to a subject in need thereof an effective amount of a variant ActRIIB polypeptide (e.g., a variant ActRIIB homomultimer protein or a variant ActRIIB heteromultimer protein). In some embodiments, the disclosure contemplates methods of reducing the severity of one or more complications of a renal disease or condition comprising administering to a subject in need thereof an effective amount of a variant ActRIIB polypeptide (e.g., a variant ActRIIB homomultimer protein or a variant ActRIIB heteromultimer protein). In some embodiments, a renal disease or condition is selected from the group consisting of Alport syndrome, focal segmental glomerulosclerosis (FSGS), polycystic kidney disease, and chronic kidney disease. In some embodiments, a renal disease or condition is Alport syndrome. In some embodiments, a renal disease or condition is focal segmental glomerulosclerosis (FSGS). In some embodiments, a renal disease or condition is polycystic kidney disease. In some embodiments, a renal disease or condition is chronic kidney disease. In some embodiments, a subject has a decline in kidney function. In some embodiments, methods of the present disclosure slow kidney function decline.

[0535] In certain aspects, the disclosure relates to methods of treating, preventing, or reducing the progression rate and/or severity of a renal disease or condition comprising administering to a subject in need thereof an effective amount of a variant ActRIIB polypeptide (e.g., a variant ActRIIB homomultimer protein or a variant ActRIIB heteromultimer protein). In some embodiments, the method relates to renal disease or condition in subjects that have Alport syndrome.

[0536] Alport syndrome, also known as hereditary nephritis, is a genetically heterogeneous disease that results from mutations in genes encoding alpha-3, alpha-4, and alpha-5 chains of type IV collagen. Type IV collagen alpha chains are normally located in various basement membranes throughout the body, including the kidneys. Abnormalities in these chains can result in defective basement membranes at these sites, which in turn lead to clinical features of Alport syndrome (e.g., progressive glomerular disease).

[0537] Transmission of Alport syndrome can be X-linked, autosomal recessive, or autosomal dominant. In some embodiments, a subject has X-linked Alport syndrome. In some embodiments, the disclosure relates to methods of treating a subject that has X-linked Alport syndrome. X-linked transmission accounts for the majority of affected patients and arises from mutations in the COL4A5 gene on the X chromosome. In some embodiments, a subject has genetic defects in the COL4A5 gene. In some embodiments, the disclosure relates to methods of treating a subject that has one or more genetic defects in the COL4A5 gene. Autosomal recessive variant accounts for approximately 15 percent of patients with Alport syndrome and arises from genetic defects in either the COL4A3 or COL4A4 genes. In some embodiments, a subject has autosomal recessive Alport syndrome. Autosomal dominant disease appears to account for between about 20 to about 30 percent of patients with Alport syndrome and arises from heterozygous mutations in the COL4A3 or COL4A4 genes. In some embodiments, a subject has autosomal dominant Alport syndrome. In some embodiments, a subject has heterozygous mutations in the COL4A3 gene. In some embodiments, a subject has heterozygous mutations in the COL4A4 gene. In some embodiments, a subject has genetic defects in the COL4A3 gene. In some embodiments, the disclosure relates to methods of treating a subject that has one or more genetic defects in the COL4A3 gene. In some embodiments, a subject has genetic defects in the COL4A4 gene. In some embodiments, the disclosure relates to methods of treating a subject that has one or more genetic defects in the COL4A4 gene. In some embodiments, a subject has genetic defects in the COL4A3 and COLA4A genes. In some embodiments, the disclosure relates to methods of treating a subject that has one or more genetic defects in the COL4A3 and COL4A4 genes. Some families exhibit digenic inheritance due to transmission of mutations in two of the three genes (COL4A3, COL4A4, COL4A5). In some embodiments, a subject has mutations in two of the three genes (COL4A3, COL4A4, COL4A5). In some embodiments, the disclosure relates to methods of treating a subject that has one or more genetic defects in the COL4A3, COL4A4, and/or COL4A5 genes.

[0538] The classical presentation of Alport syndrome is based upon clinical manifestations of affected males with X-linked disease. In some embodiments, a subject with X-linked disease has one or more of glomerular disease that progresses to end-stage renal disease (ESRD). Clinical presentation and course in patients with autosomal recessive disease is similar to those with X-linked disease. Patients with autosomal dominant disease generally exhibit more gradual loss of renal function.

[0539] Initially, renal manifestation of Alport syndrome is typically asymptomatic persistent microscopic hematuria (e.g., presence of blood in the urine), which is usually present in early childhood in affected patients. Since screening urinalysis is seldom performed in routine pediatric primary care, microscopic hematuria may not be detected unless the patient is screened because of an affected family member or found as an incidental finding for another issue. Gross hematuria may be the initial presenting finding and often occurs after an upper respiratory infection. However, recurrent episodes of gross hematuria are not uncommon especially during childhood. In some embodiments, the disclosure relates to methods of treating a subject that has asymptomatic persistent microscopic hematuria. In some embodiments, the disclosure relates to methods of treating a subject that has gross hematuria. In some embodiments, the disclosure relates to methods of treating a subject that has recurring episodes of gross hematuria. In some embodiments, the disclosure relates to methods of reducing the severity, occurrence, and/or duration of asymptomatic persistent microscopic hematuria, gross hematuria, or persistent microscopic hematuria in a subject in need thereof (e.g., a subject with Alport syndrome).

[0540] Patients with Alport syndrome typically have normal C3 levels, which is a component of the complement pathway that plays an integral role in the body’s immune defenses. Decreased C3 may be associated with acute glomerulonephritis, membranoproliferative glomerulonephritis, immune complex disease, active systemic lupus erythematosus, septic shock, and end-stage liver disease, among other conditions. In early childhood, serum creatinine and blood pressure measurements are usually at normal levels as well. In some embodiments, the disclosure relates to methods of treating a subject with Alport syndrome that has normal levels of C3. In some embodiments, the disclosure relates to methods of treating a subject with Alport syndrome that has decreased levels of C3 compared to a baseline measurement. In some embodiments, the disclosure relates to methods of increasing C3 levels in a subject in need thereof (e.g., a subject with Alport syndrome).

[0541] Proteinuria, hypertension, and progressive renal insufficiency may develop in a subject with Alport syndrome. Proteinuria comprises a presence of excess proteins in urine. Albumin is a protein produced by the liver which makes up roughly 50%-60% of the proteins in the blood. Due to this, the concentration of albumin in the urine is one of the most sensitive indicators of any kidney disease, particularly for subjects with diabetes or hypertension, compared to a routine proteinuria examination. This measurement is often referred to as albuminuria. In some embodiments, the disclosure relates to methods of treating a subject that has proteinuria. In some embodiments, the disclosure relates to methods of treating a subject that has hypertension. In some embodiments, the disclosure relates to methods of treating a subject that has progressive renal insufficiency. In some embodiments, the disclosure relates to methods of reducing the severity, occurrence, and/or duration of one or more of proteinuria, hypertension, and progressive renal insufficiency in a subject in need thereof (e.g., a subject with Alport syndrome).

[0542] Subjects with Alport syndrome may develop end-stage renal disease (ESRD). ESRD usually occurs between the ages of 16 and 35 years in patients with X-linked or autosomal recessive Alport syndrome, among many other renal diseases and conditions. In some families, the course is more indolent with kidney failure being delayed until age 45 to 60, especially in those with autosomal dominant Alport syndrome. Females with X-linked Alport syndrome may have recurrent episodes of gross hematuria, proteinuria, and diffuse glomerular basement membrane (GBM) thickening are associated with more severe kidney dysfunction and ESRD at an earlier age. In some embodiments, the disclosure relates to methods of treating subjects with Alport syndrome that have ESRD. In some embodiments, the disclosure relates to methods of treating females with X-linked Alport syndrome. In some embodiments, the disclosure relates to methods of reducing severity, occurrence and/or duration of one or more of gross hematuria, proteinuria, and diffuse glomerular basement membrane (GBM) thickening are associated with more severe kidney dysfunction and ESRD in a subject in need thereof (e.g., a subject with Alport syndrome).

[0543] A diagnosis of Alport syndrome may be made by molecular genetic testing, or by skin or renal biopsy. Molecular genetic next generation analysis is a preferred method to make a diagnosis for patients with a positive family history for persistent hematuria and/or end-stage renal disease (ESRD) and for patients with chronic kidney disease (CKD), regardless of family history. Alport syndrome can be distinguished from other glomerular diseases by presence of a characteristic finding of lamination of the glomerular basement membrane (GBM) in samples from a renal biopsy, or abnormalities of type IV collagen by immunostaining, or by identification of one or more mutations in COL4A3, COL4A4, or COL4A5. Thin glomerular basement membranes in a subject with a COL4A3, COL4A4, or COL4A5 mutation, with or without the manifestation of FSGS, is properly diagnosed as Alport syndrome. In some embodiments, the disclosure relates to methods of treating subjects with Alport syndrome that have a positive family history for persistent hematuria and/or end-stage renal disease (ESRD) and/or for patients with chronic kidney disease (CKD).

[0544] In certain aspects, the disclosure relates to methods of treating, preventing, or reducing the progression rate and/or severity of a renal disease or condition comprising administering to a subject in need thereof an effective amount of a variant ActRIIB polypeptide (e.g., a variant ActRIIB homomultimer protein or a variant ActRIIB heteromultimer protein) to subjects that have focal segmental glomerulosclerosis (FSGS).

[0545] FSGS is a glomerular scarring disease characterized by an effacement of the podocyte foot on a kidney biopsy. When urine samples from subjects suffering FSGS are analyzed, a massive urine protein loss is typically observed, which can progress to a renal failure. FSGS is a common histopathologic lesion among adults with idiopathic nephrotic syndrome in the United States, accounting for about 35 percent of all cases. FSGS is also the most common primary glomerular disease identified in patients with end-stage renal disease (ESRD) in the United States. Prevalence of FSGS as a lesion associated with ESRD has risen. FSGS is characterized by the presence of sclerosis in parts (segmental) of at least one glomerulus (focal) of a kidney biopsy specimen, when examined by light microscopy (LM), immunofluorescence (IF), or electron microscopy (EM). In some embodiments, the disclosure relates to methods of reducing severity, occurrence and/or duration of urine protein loss in a subject in need thereof (e.g., a subject with FSGS). In some embodiments, the disclosure relates to methods of reducing severity, occurrence and/or duration of renal failure in a subject in need thereof (e.g., a subject with FSGS). In some embodiments, the disclosure relates to methods of reducing severity, occurrence and/or duration of end stage renal disease (ESRD) in a subject in need thereof (e.g., a subject with FSGS). In some embodiments, the disclosure relates to methods of reducing severity, occurrence and/or duration of sclerosis in a glomerulus of a kidney in a subject in need thereof (e.g., a subject with FSGS).

[0546] FSGS arises as a consequence of multiple pathways either individually or collectively resulting in injury to a podocyte, which is a cell in the Bowman’s capsule in the kidneys that wraps around capillaries of the glomerulus. There are five known etiologies, and a suggested sixth etiology, associated with FSGS. Etiologies of FSGS comprise primary (e.g., idiopathic), secondary (e.g., adaptive), genetic, virus-associated, medication-associated, and APOL1 risk allele-associated. Primary or idiopathic FSGS is associated with a plasma factor with responsiveness to immunosuppressive therapy and a risk of recurrence after kidney transplant. In primary FSGS, a putative circulating factor that is toxic to a podocyte causes generalized podocyte dysfunction. Primary FSGS most often presents with the nephrotic system. Secondary (e.g., adaptive) FSGS is associated with excessive nephron workload due to increased body size, reduced nephron capacity, or single glomerular hyperfiltration associated with certain diseases. Secondary FSGS generally occurs as an adaptive phenomenon that results from a reduction in nephron mass, or can be considered as medicated-induced by direct toxicity from drugs (e.g., heroin, interferon, and pamidronate) or virus-induced by viral infections (e.g., HIV). Secondary FSGS often presents with non-nephrotic proteinuria, and/or with some degree of renal insufficiency. Secondary FSGS most commonly refers to FSGS that develops as an adaptive response to glomerular hypertrophy or hyperfiltration. Additional etiologies are recognized as drivers of FSGS, including high-penetrance genetic FSGS due to mutations in one of nearly 40 genes (genetic FSGS), virus-associated FSGS, and medication-associated FSGS. Emerging data support the identification of a sixth etiology: APOL1 risk allele-associated FSGS in individuals with sub-Saharan ancestry. Sometimes, secondary FSGS encompasses virus-associated FSGS and/or medication-associated FSGS. In some embodiments, the disclosure relates to methods of treating a subject with primary or idiopathic FSGS. In some embodiments, the disclosure relates to methods of treating a subject with secondary or adaptive FSGS. In some embodiments, the disclosure relates to methods of treating a subject with genetic FSGS. In some embodiments, the disclosure relates to methods of treating a subject with virus-associated FSGS. In some embodiments, the disclosure relates to methods of treating a subject with medication-associated FSGS. In some embodiments, the disclosure relates to methods of treating a subject with APOL1 risk allele-associated FSGS.

[0547] Primary FSGS comprises several prototypical characteristics. Primary FSGS is the most common form of FSGS in adolescents and young adults, and is commonly associated with nephrotic-range proteinuria (sometimes massive proteinuria, e.g., >10 g protein/day in the urine), reduced plasma albumin levels, and/or hyperlipidemia. In some embodiments, nephrotic-range proteinuria comprises proteinuria >3.5 g protein/day, and/or hypoalbuminemia <3.5 g albumin/dL urine (<35 g/L), and/or other manifestations of the nephrotic syndrome (e.g., edema, hyperlipidemia). In some embodiments, the disclosure relates to methods of reducing severity, occurrence and/or duration of one or more of nephrotic range proteinuria, reduced plasma albumin levels, or hyperlipidemia in a subject in need thereof (e.g., a subject with primary FSGS). In some embodiments, the disclosure relates to methods of reducing severity, occurrence and/or duration of proteinuria in a subject in need thereof (e.g., a subject with primary FSGS).

[0548] A subject with secondary or adaptive FSGS typically presents with slowly increasing proteinuria and renal insufficiency over time. Proteinuria in subjects with secondary FSGS often presents in the non-nephrotic range (e.g., nephrotic range is typically a loss of 3 grams or more of protein in the urine per day, and/or presence of 2 grams of protein per gram of creatinine in the urine). Sometimes, proteinuria in subjects with secondary FSGS comprises serum albumin levels that are normal. A subject with secondary FSGS may have s a glomerular filtration rate (GFR) that is elevated, which is a measurement of the flow rate of filtered fluid through the kidney. In some embodiments, a subject with secondary FSGS and an increase in GFR may have one or more additional and/or associated conditions selected from the group consisting of congenital cyanotic heart disease, sickle cell anemia, obesity, androgen abuse, sleep apnea, and high-protein diet. In some embodiments, the disclosure relates to methods of treating a subject with secondary FSGS with a normal GFR. In some embodiments, the disclosure relates to methods of treating a subject with secondary FSGS that has a decreased GFR. In some embodiments, the disclosure relates to methods of reducing severity, occurrence and/or duration of proteinuria and/or renal insufficiency in a subject in need thereof (e.g., a subject with primary FSGS).

[0549] Viruses have been implicated in causing FSGS. HIV-1 may be associated with FSGS, particularly the collapsing glomerulopathy variant. Other viruses that have been implicated in causing FSGS include, but are not limited to, cytomegalovirus, parvovirus B19, and Epstein-Barr virus. Parasites have also been associated with FSGS, which include, but are not limited to, Plasmodium (malaria), Schistosoma mansoni, and filiariasis. In some embodiments, the disclosure relates to methods of treating a subject with FSGS associated with HIV-1. In some embodiments, the disclosure relates to methods of treating a subject with FSGS associated with one or more of HIV-1, cytomegalovirus, parvovirus B19, and Epstein-Barr virus. In some embodiments, the disclosure relates to methods of treating a subject with FSGS associated with parasites including, but not limited to, Plasmodium (malaria), Schistosoma mansoni, and filiariasis. In some embodiments, the disclosure relates to methods of treating subjects with FSGS associated with an infection including, but not limited to, HIV, cytomegalovirus, parvovirus B19, Epstein-Barr virus, pulmonary tuberculosis, leishmaniasis, and malaria.

[0550] In some embodiments, the disclosure relates to methods of treating subjects with FSGS associated with autoimmune disorders implicated in causing FSGS including, but not limited to Adult Still’s disease, systemic lupus erythematosus, and mixed connective tissue disorder.

[0551] In some embodiments, the disclosure relates to methods of treating subjects with FSGS associated with malignancies implicated in causing FSGS including, but not limited to hemophagocytic lymphohistiocytosis, multiple myeloma, and acute monoblastic leukemia.

[0552] In some embodiments, the disclosure relates to methods of treating subjects with FSGS associated with acute glomerular ischemias implicated in causing FSGS including, but not limited to thrombotic microangiopathy, renal infarction, atheroembolism, and hydrophilic polymer embolism.

[0553] In some embodiments, the disclosure relates to methods of treating subjects with FSGS associated with genetic disorders implicated in causing FSGS including, but not limited to APOL1 high-risk alleles, sickle cell disease, mitochondrial disorders (coenzyme Q deficiency), acute myoclonus-renal failure syndrome, and Galloway-Mowat syndrome.

[0554] In some embodiments, the disclosure relates to methods of treating subjects with FSGS associated with post transplantation events implicated in causing FSGS including, but not limited to Arteriopathy/thrombotic microangiopathy, acute rejection, and viral infection (cytomegalovirus, Epstein-Barr virus, BK polyomavirus).

[0555] In some embodiments, the disclosure relates to methods of treating subjects with FSGS associated with certain medications. In some embodiments, IFN-α, -β, or -γ therapy has been associated with development of collapsing glomerulopathy. In some embodiments, the disclosure relates to methods of treating subjects with FSGS associated with one or more of podocyte injury, including MCD, FSGS, and particularly, collapsing FSGS (collapsing glomerulopathy) who have taken and/or are still taking bisphosphonates. In some embodiments, the disclosure relates to methods of treating subjects with FSGS who have been on and/or are currently on lithium therapy. In some embodiments, the disclosure relates to methods of treating subjects with FSGS who have taken and/or are still taking sirolimus. In some embodiments, the disclosure relates to methods of treating subjects with FSGS who have taken and/or are still taking anthracycline medications, including doxorubicin (Adriamcyin) and daunomycin. In some embodiments, the disclosure relates to methods of treating subjects with FSGS who have taken and/or are still taking medications implicated in causing FSGS including, but not limited to bisphosphonates, interferons (alpha, beta, or gamma), anabolic steroids, calcineurin inhibitors, and mammalian (mechanistic) target of rapamycin (mTOR) inhibitors.

[0556] Genetic FSGS takes two forms. In some embodiments, the disclosure relates to methods of treating subjects with genetic FSGS associated with one or more variants in susceptibility genes (i.e., some individuals with a particular variant will develop FSGS, and other individuals will not). In some embodiments, the disclosure relates to methods of treating subjects with FSGS associated with one or more susceptibility genes including, but not limited to APOL1 and PDSS1. In some embodiments, the disclosure relates to methods of treating subjects with genetic FSGS associated with one or more high-penetrance mutations that manifest either Mendelian inheritance (for nuclear genes) or maternal inheritance (for genes encoded by mitochondrial DNA). The number of genes associated with FSGS rises every year, in large part because of the dissemination of whole-exome sequencing. At least 38 genes have been identified in relation to genetic FSGS. In some embodiments, the disclosure relates to methods of treating subjects with FSGS associated with one or more genes involved in genetic FSGS comprising COL4A3, COL4A4, COL4A5, ITGB4, LAMB2, NPHS, NPHS2, CD2AP, PTPRO, MYO1E, ACTN4, INF2, AHRGP24, AHRGDIA, MYH9, INF1, MT-TL1, MT-TL2, MT-TY, COQ2, COQ6, PDSS2, ADCK, WT1, NUP95, NUP203, XP05, NXFS, PAX2, LMX1B, SMARCAL1, NXF5, EYA1, WDR73, LMNA, PLCE1, TRPC6, KANK4, SCARB2, and TTC21B.

[0557] In some embodiments, a subject suspected of FSGS is administered a kidney biopsy. A kidney biopsy may be analyzed by light microscopy to determine one or more of glomerular size, histologic variant of FSGS, microcystic tubular changes, and tubular hypertrophy. Further, a kidney biopsy may be analyzed by immunofluorescence to rule out other primary glomerulopathies and/or by electron microscopy to determine one or more of an extent of podocyte foot process effacement, podocyte microvillous transformation, and tubuloreticular inclusions. A complete assessment of renal histology is important for establishing the parenchymal setting of segmental glomerulosclerosis, distinguishing FSGS associated with one of many other glomerular diseases from the clinical-pathologic syndrome of FSGS. In some embodiments, genetic testing is used to further analyze a subject for a genetic FSGS etiology.

[0558] Traditionally, FSGS was classified based upon the Columbia classification, which defined five morphologic variants of FSGS lesions based upon LM examination. This classification system was designed to rely solely on pathologic criteria and does not integrate these findings with clinical and/or genetic information. In general, morphologic characteristics seen on kidney biopsy cannot distinguish between genetic and nongenetic forms of FSGS. Exceptions include distinctive features associated with NPHS1 and actinin alpha 4 gene mutations and the disease-specific lesions of Fabry disease, Alport syndrome, and lecithin-cholesterol acyl transferase deficiency. Histologic variants of FSGS comprise FSGS not otherwise specified (NOS) (formerly called classic FSGS, which is the most common form); collapsing variant, tip variant; perihilar variant; and cellular variant. Although the appearance of a glomerulus on LM, by definition, differs among these forms, they all share ultrastructural findings of podocyte alterations. Tip lesions affect the portion of the glomerular tuft juxtaposed to the tubular pole, and a tip lesion abnormality includes one or more of adhesion to Bowman’s capsule at the tip, hypercellularity, presence of foam cells, and/or sclerosis. A collapsing variant shows segmental or global mesangial consolidation and loss of endocapillary patency in association with extracapillary epithelial hypertrophy and/or proliferation. Perihilar and NOS variants are determined by whether the segmental sclerosis/segmental obliteration of capillary loops with matrix increase (with or without hyalinosis) involves the segment near the hilum or the specific segment cannot be determined, respectively. A cellular lesion is the most difficult lesion to identify reproducibly. A cellular lesion shows segmental endocapillary hypercellularity occluding lumens with or without foam cells and karyorrhexis.

[0559] In certain aspects, the disclosure relates to methods of treating, preventing, or reducing the progression rate and/or severity of a renal disease or condition comprising administering to a subject in need thereof an effective amount of a variant ActRIIB polypeptide (e.g., a variant ActRIIB homomultimer protein or a variant ActRIIB heteromultimer protein), wherein the renal disease or condition is polycystic kidney disease (PKD).

[0560] Polycystic Kidney Disease occurs in two forms: autosomal recessive (ARPKD) and autosomal dominant (ADPKD). The two forms of the disease have distinct genetic basis and two genes involved in ADPKD has been identified one gene involved in ARPKD has been identified. The manifestations of the two different types of disease are very similar, and both result from a hyperproliferation of tubule epithelial cells that ultimately results in destruction of tubular structure with cyst formation leading to chronic renal failure. In some embodiments, the disclosure relates to methods of treating subjects with autosomal recessive polycystic kidney disease (ARPKD). In some embodiments, the disclosure relates to methods of treating subjects with autosomal dominant polycystic kidney disease (ADPKD).

[0561] Autosomal dominant polycystic kidney disease (ADPKD) is a hereditary disorder of the kidneys characterized by markedly enlarged kidneys with extensive cyst formation throughout. These cysts progressively enlarge with age, as kidney function gradually declines. A diagnosis of ADPKD is based on family history and ultrasonographic evaluation. In as many as 25% of patients with ADPKD, no family history is identified, which may be related to subclinical disease or a new genetic mutation in about 5% of such cases. A defining feature of ADPKD is marked bilateral, renal enlargement. Patients with ADPKD typically progress to end-stage renal disease (ESRD) by the fifth or sixth decade of life. The rate of progression of ADPKD is related directly to kidney volume, and therapies aim to slow the decline in renal volume to delay progression. In some embodiments, the disclosure relates to methods of reducing severity, occurrence and/or duration of cysts on the kidney in a subject in need thereof. In some embodiments, the disclosure relates to methods of reducing severity, occurrence and/or duration of renal enlargement in a subject in need thereof. In some embodiments, the disclosure relates to methods of reducing severity, occurrence and/or duration of an increase in kidney volume (e.g., total kidney volume) in a subject in need thereof.

[0562] ADPKD can be attributed to an abnormality on chromosome 16 (PKD1 locus) or chromosome 4 (PKD2 locus). PKD1 mutations comprise about 78% of ADPKD cases, while PKD2 mutations comprise about 14% of cases. PKD1 patients tend to progress to ESRD at an earlier age than PKD2 patients. In some embodiments, the disclosure relates to methods of treating a subject with ADPKD that has a mutation in the PKD1 locus. In some embodiments, the disclosure relates to methods of treating a subject with ADPKD that has a mutation in the PKD2 locus.

[0563] The PKD1 and PKD2 genes encode the proteins polycystin-1 and polycystin-2, respectively. These polycystins are integral membrane proteins and are found in renal tubular epithelia. It is postulated that abnormalities in polycystin-1 impair cell-cell and cell-matrix interactions in the renal tubular epithelia, while abnormalities in polycystin-2 impair calcium signaling in the cells.

[0564] Resultant changes in renal pathophysiology due to PKD include, but are not limited to, hematuria (often gross), a concentrating defect (resulting in polyuria and increased thirst), mild proteinuria, nephrolithiasis (in about 25% of ADPKD patients), flank pain, and abdominal pain. Furthermore, cyst rupture, hemorrhage, and infection are common complications. Progressive renal decline often results in end-stage renal disease. Hypertension is the most prevalent initial clinical presentation, occurring in about 50% to about 70% of cases, and is the most common feature directly associated with the rate of decline to ESRD and cardiovascular complications. In some embodiments, the disclosure relates to methods of reducing severity, occurrence and/or duration of one or more of hematuria, a concentrating defect, proteinuria, nephrolithiasis, flank pain, and abdominal pain in a subject in need thereof. In some embodiments, the disclosure relates to methods of reducing severity, occurrence and/or duration of one or more of cyst rupture, hemorrhage, and infection in a subject in need thereof. In some embodiments, the disclosure relates to methods of reducing severity, occurrence and/or duration of end-stage renal disease (ESRD) in a subject in need thereof. In some embodiments, the disclosure relates to methods of reducing severity, occurrence and/or duration of hypertension in a subject in need thereof.

[0565] Multiple extra-renal manifestations are often present in a subject with polycystic kidney disease. Cerebral aneurysms occur in about 5% of young adults, and as many as 20% of patients over the age of 60. Risk of a cerebral aneurysm or subarachnoid hemorrhage is highest in subjects with a family history of the same. Extrarenal cysts are common in ADPKD. Hepatic cysts are often noted in these patients, and prevalence increases with age. As many as 94% of patients over the age of 35 have been reported to have hepatic cysts. Total cyst prevalence and volume is higher in women versus men. Hepatic cysts in ADPKD patients rarely cause liver dysfunction. Rarely, patients develop pain from an acute cyst infection or hemorrhage. In addition, between about 7% and about 36% of ADPKD patients develop pancreatic cysts, with a higher prevalence in ADPKD patients with PKD2 mutations. Cardiac valvular disease has been noted in 25% to 30% of ADPKD patients. Cardiovascular complications, particularly cardiac hypertrophy and coronary artery disease, are leading causes of death in patients with ADPKD. In some embodiments, the disclosure relates to methods of reducing severity, occurrence and/or duration of a cerebral aneurysm in a subject in need thereof. In some embodiments, the disclosure relates to methods of reducing severity, occurrence and/or duration of extrarenal cysts in a subject in need thereof. In some embodiments, the disclosure relates to methods of reducing severity, occurrence and/or duration of hepatic cysts in a subject in need thereof. In some embodiments, the disclosure relates to methods of reducing severity, occurrence and/or duration of pancreatic cysts in a subject in need thereof. In some embodiments, the disclosure relates to methods of reducing severity, occurrence and/or duration of cardiovascular complications (e.g., cardiac hypertrophy, coronary artery disease) in a subject. in need thereof

[0566] Autosomal recessive polycystic kidney disease (ARPKD) is a cause of significant renal and liver-related morbidity and mortality in children. A majority of subjects with ARPKD present in the neonatal period with enlarged echogenic kidneys. Renal disease is characterized by nephromegaly, hypertension, and varying degrees of renal dysfunction. More than 50% of affected individuals with ARPKD progress to end-stage renal disease (ESRD) within the first decade of life, and subjects with ARPKD whom progressed to ESRD may require kidney transplantation. In some embodiments, the disclosure relates to methods of reducing severity, occurrence and/or duration of one or more nephromegaly, hypertension, and renal dysfunction in a subject in need thereof. In some embodiments, the disclosure relates to methods of reducing severity, occurrence and/or duration of end stage renal disease in a subject in need thereof, preventing a need for kidney transplantation.

[0567] ARPKD can be attributed to mutations in the PKHD1 gene located on chromosome 6p21, which contains at least 66 exons and encodes fibrocystin (also referred to as polyductin), a large integral membrane protein. Although the function of fibrocystin is presently unknown, it is found in the cortical and medullary collecting ducts and the thick ascending limb of the kidney, and in the epithelial cells of the hepatic bile duct. In some embodiments, the disclosure relates to methods of treating a subject with ARPKD that is associated with one or more mutations in PKHD1.

[0568] Because of the diversity of PKIID1 mutations, it can be challenging to correlate genotype with phenotype in cases of ARPKD. Subjects with two truncation mutations may have more severe renal involvement and are possibly at risk for early neonatal death. Subjects who are homozygotes for a missense mutation, or who have a missense mutation paired with a truncating mutation, may also have a severe phenotype. Subjects who are heterozygotes with two missense mutations typically have milder disease. Subjects who survive the neonatal period most often have at least one missense mutation. In some embodiments, the present disclosure relates to methods of treating a subject with ARPKD comprising two truncation mutations. In some embodiments, the present disclosure relates to methods of treating a subject with ARPKD comprising one or more missense mutations.

[0569] Two primary organ systems affected in ARPKD are the kidney and hepatobiliary tract. Kidneys may increase in size and/or have microcysts (usually less than 2 mm in size), which radiate from the medulla to the cortex, and are visible as pinpoint dots on the capsular surface. Severity of renal disease is proportional to the percentage of nephrons affected by cysts. Larger renal cysts (up to 1 cm) and interstitial fibrosis develop, which contribute to the progressive deterioration of renal function seen in subjects who survive beyond the neonatal period. ARPKD is associated with biliary dysgenesis due to a developmental defect comprising varying degrees of dilatation of the intrahepatic bile ducts and hepatic fibrosis. In some embodiments, the disclosure relates to methods of reducing severity, occurrence and/or duration of an increase in kidney size and/or presence of cysts.

[0570] Clinical presentation of ARPKD varies based on the age of onset of symptoms and the predominance of hepatic or renal involvement. ARPKD is often detected by routine antenatal ultrasonography in fetuses after 24 weeks of gestation. A presumptive diagnosis is based on the presence of characteristic findings of markedly enlarged echogenic kidneys with poor corticomedullary differentiation. Discrete cysts ranging in size from 5 to 7 mm in diameter may be detected; however, larger cysts are unusual, especially those >10 mm in diameter. Subjects with ARPKD are typically monitored for blood pressure changes, renal function, serum electrolyte concentrations, hydration status, nutritional status, and growth. In some embodiments, the disclosure relates to methods of treating a subject with ARPKD further comprising monitoring one or more of blood pressure, renal function, serum electrolyte concentration, hydration status, nutritional status, and growth.

[0571] During the neonatal period, infants can present with renal manifestations, which may or may not be accompanied by respiratory distress. An infant with ARPKD may present with bilateral markedly enlarged kidneys, which may impact pulmonary function or lead to difficulty in feeding due to renal compression of the stomach. An infant with ARPKD may present with renal function impairment reflected by increased serum/plasma concentrations of creatinine and blood urea nitrogen (BUN). Neonates with end-stage renal disease (ESRD) may require renal replacement therapy (RRT) for survival. An infant with ARPKD may present with one or more of hypertension and hyponatremia (due to the inability to dilute urine maximally). In some embodiments, the disclosure relates to methods of reducing severity, occurrence and/or duration of renal function impairment reflected by increased serum/plasma concentrations of creatinine and blood urea nitrogen (BUN) in a subject in need thereof. In some embodiments, the disclosure relates to methods of reducing severity, occurrence and/or duration of hypertension and/or hyponatremia in a subject in need thereof.

[0572] For patients who survive beyond the neonatal period, there can be improvement of renal function due to continued renal maturation. However, over time, progressive deterioration of renal function can develop, which may be rapid or slow and may result in ESRD. An adolescent subject with ARPKD may have one or more of progressive deterioration of renal function (usually beginning with signs of tubular dysfunction or injury, polyuria and/or polydipsia due to a reduced concentrating ability, a maximal urine osmolality below 500 mosmol/kg, metabolic acidosis due to decreased urinary acidification capacity, hypertension, recurrent episodes of urinary tract infections, urinary abnormalities (including, but not limited to, mild proteinuria, glucosuria, hyperphosphaturia, and/or increased urinary excretion of magnesium), progressive renal impairment, and decreased kidney growth rate and/or kidney size. In some embodiments, the present disclosure relates to methods of reducing severity, occurrence and/or duration of one or more of progressive deterioration of renal function, progressive renal impairment, and decreased kidney growth rate and/or kidney size in a subject in need thereof.

[0573] Ultrasound findings of ARPKD are characterized by bilateral large echogenic kidneys with poor corticomedullary differentiation. In patients with only medullary involvement, standard-resolution ultrasonography may be normal; however, high-resolution ultrasonography is able to detect ductal dilations confined to the medulla. Macrocysts, typically seen in subjects with autosomal dominant disease, are not usually present during infancy in patients with ARPKD, but may appear in older children. As a result, in older subjects, it may be more challenging to differentiate ARPKD from autosomal dominant polycystic kidney disease (ADPKD) by ultrasound. In some embodiments, the present disclosure relates to methods of treating a subject with ARPKD or ADPKD, further comprising differentiation of disease by ultrasound.

[0574] In certain aspects, the disclosure relates to methods of treating, preventing, or reducing the progression rate and/or severity of a renal disease or condition comprising administering to a subject in need thereof an effective amount of a variant ActRIIB polypeptide (e.g., a variant ActRIIB homomultimer protein or a variant ActRIIB heteromultimer protein) to a subject that has chronic kidney disease (CKD).

[0575] Chronic kidney disease (CKD) is a condition in which the kidneys are damaged and cannot filter blood as well as healthy kidneys. A subject with CKD typically has excess fluid and waste from blood remaining in the body. In some embodiments, the disclosure provides methods of treating a subject with CKD. In some embodiments, the disclosure relates to treating a subject with CKD, wherein the subject also has one or more other health conditions selected from the group consisting of anemia or low number of red blood cells, increased occurrence of infections, low calcium levels, high potassium levels, and high phosphorus levels in the blood, loss of appetite or eating less, depression or lower quality of life.

[0576] CKD has varying levels of seriousness and typically gets worse over time, though treatment has been shown to slow progression. If left untreated, CKD can progress to kidney failure, end stage renal disease (ESRD), and/or early cardiovascular disease, potentially leading to dialysis or kidney transplant for survival. In some embodiments, the present disclosure relates to methods of reducing severity, occurrence and/or duration of kidney failure, end stage renal disease (ESRD), and/or early cardiovascular disease in a subject in need thereof.

[0577] Diagnosis of CKD is typically accomplished by blood tests to measure the estimated glomerular filtration rate (eGFR), and/or a urine test to measure albumin and/or overall protein in the urine. Typically, an increase in protein in the urine indicates CKD. Ultrasound or kidney biopsy may be performed to determine an underlying cause.

[0578] In some embodiments, CKD manifests initially without symptoms, and is usually detected on routine screening blood work by either an increase in serum creatinine, and/or protein in the urine. As kidney function of a subject with CKD decreases, blood pressure increases due to fluid overload and production of vasoactive hormones created by the kidney via the renin-angiotensin system, thereby increasing the risk of developing hypertension and heart failure. As urea accumulates in a subject with CKD, azotemia and ultimately uremia (symptoms ranging from lethargy to pericarditis and encephalopathy) may arise. Due to its high systemic concentration, urea is excreted in eccrine sweat at high concentrations and crystallizes on skin as the sweat evaporates (e.g., “uremic frost”). In a subject with CKD, potassium may accumulate in the blood (e.g., hyperkalemia with a range of symptoms including malaise and potentially fatal cardiac arrhythmias). Hyperkalemia usually does not develop in a subject with CKD until the glomerular filtration rate (GFR) falls to less than about 20 to about 25 ml/min/1.73 m², at which point the kidneys have decreased ability to excrete potassium. Hyperkalemia in CKD can be exacerbated by acidemia (which leads to extracellular shift of potassium) and from lack of insulin. A subject with CKD may have hyperphosphatemia, which can result from poor phosphate elimination in the kidney. Hyperphosphatemia contributes to increased cardiovascular risk by causing vascular calcification. A subject with CKD may have hypocalcemia. A subject with CKD may have one or more changes in mineral and bone metabolism that may cause abnormalities of calcium, phosphorus (phosphate), parathyroid hormone, or vitamin D metabolism; abnormalities in bone turnover, mineralization, volume, linear growth, or strength (kidney osteodystrophy); and/or vascular or other soft-tissue calcification. A subject with CKD may have metabolic acidosis that may result from decreased capacity to generate enough ammonia from the cells of the proximal tubule. A subject with CKD may have anemia. In later stages of CKD, a subject may develop cachexia, leading to unintentional weight loss, muscle wasting, weakness and anorexia. Subjects with CKD are more likely than the general population to develop atherosclerosis with consequent cardiovascular disease. In some embodiments, the present disclosure relates to methods of reducing severity, occurrence and/or duration of one or more conditions or complications of CKD selected from the group consisting of blood pressure increase, hypertension and/or heart failure, azotemia, uremia, “uremic frost”, hyperkalemia, decreased ability of the kidney to excrete potassium, acidemia, hyperphosphatemia, vascular calcification, hypocalcemia. changes in mineral and bone metabolism (particularly changes that may cause abnormalities of calcium, phosphorus (phosphate), parathyroid hormone, or vitamin D metabolism), abnormalities in bone turnover, mineralization, volume, linear growth, or strength (kidney osteodystrophy), vascular or other soft-tissue calcification, metabolic acidosis, anemia, cachexia (particularly cachexia that may lead to unintentional weight loss, muscle wasting, weakness and anorexia), and atherosclerosis (which may lead to cardiovascular disease).

[0579] Common causes of CKD are diabetes mellitus, hypertension, and glomerulonephritis. About one of five adults with hypertension and one of three adults with diabetes have CKD. CKD may also be caused by one or more of vascular diseases (including but not limited to, large vessel disease such as bilateral kidney artery stenosis and small vessel disease such as ischemic nephropathy, hemolytic-uremic syndrome, vasculitis), primary glomerular disease (focal segmental glomerulosclerosis (FSGS) and/or IgA nephropathy (or nephritis)), secondary glomerular disease (such as diabetic nephropathy and lupus nephritis), tubulointerstitial disease (which includes drug- and toxin-induced chronic tubulointerstitial nephritis, and reflux nephropathy), obstructive nephropathy (as exemplified by bilateral kidney stones and benign prostatic hyperplasia of the prostate gland), and congenital disease (such as polycystic kidney disease). Rarely, pinworms infecting the kidney can cause obstructive nephropathy. In some embodiments, the present disclosure relates to methods of treating a subject with CKD caused by one or more of diabetes mellitus, hypertension, and glomerulonephritis, vascular diseases (including but not limited to, large vessel disease such as bilateral kidney artery stenosis and small vessel disease such as ischemic nephropathy, hemolytic-uremic syndrome, vasculitis), primary glomerular disease (focal segmental glomerulosclerosis (FSGS) and/or IgA nephropathy (or nephritis)), secondary glomerular disease (such as diabetic nephropathy and lupus nephritis), tubulointerstitial disease (which includes drug- and toxin-induced chronic tubulointerstitial nephritis, and reflux nephropathy), obstructive nephropathy (as exemplified by bilateral kidney stones and benign prostatic hyperplasia of the prostate gland), and congenital disease (such as polycystic kidney disease). Rarely, pinworms infecting the kidney can cause obstructive nephropathy.

[0580] In some embodiments, any of the variant ActRIIB proteins in either homomeric or heteromeric form disclosed herein may be used, alone or in combination with one or more supportive therapies or active agents, to treat, prevent, or reduce the progression rate and/or severity of chronic kidney disease (e.g., tissue damage, inflammation, and/or fibrosis). Chronic kidney disease (CKD), also known as chronic renal disease, is a progressive loss in renal function over a period of months or years. The symptoms of worsening kidney function may include feeling generally unwell and experiencing a reduced appetite. Often, chronic kidney disease is diagnosed as a result of screening of people known to be at risk of kidney problems, such as those with high blood pressure or diabetes and those with a blood relative with CKD. This disease may also be identified when it leads to one of its recognized complications, such as cardiovascular disease, anemia, or pericarditis. Recent professional guidelines classify the severity of CKD in five stages, with stage 1 being the mildest and usually causing few symptoms and stage 5 being a severe illness with poor life expectancy if untreated. Stage 5 CKD is often called end-stage kidney disease, end-stage renal disease, or end-stage kidney failure, and is largely synonymous with the now outdated terms chronic renal failure or chronic kidney failure; and usually means the patient requires renal replacement therapy, which may involve a form of dialysis, but ideally constitutes a kidney transplant. CKD is initially without specific symptoms and is generally only detected as an increase in serum creatinine or protein in the urine. As the kidney function decreases, various symptoms may manifest as described below. Blood pressure may be increased due to fluid overload and production of vasoactive hormones created by the kidney via the renin-angiotensin system, increasing one’s risk of developing hypertension and/or suffering from congestive heart failure. Urea may accumulate, leading to azotemia and ultimately uremia (symptoms ranging from lethargy to pericarditis and encephalopathy). Due to its high systemic circulation, urea is excreted in eccrine sweat at high concentrations and crystallizes on skin as the sweat evaporates (“uremic frost”). Potassium may accumulate in the blood (hyperkalemia with a range of symptoms including malaise and potentially fatal cardiac arrhythmias). Hyperkalemia usually does not develop until the glomerular filtration rate falls to less than 20-25 ml/min/1.73 m2, at which point the kidneys have decreased ability to excrete potassium. Hyperkalemia in CKD can be exacerbated by acidemia (which leads to extracellular shift of potassium) and from lack of insulin. Erythropoietin synthesis may be decreased causing anemia. Fluid volume overload symptoms may occur, ranging from mild edema to life-threatening pulmonary edema. Hyperphosphatemia, due to reduced phosphate excretion, may occur generally following the decrease in glomerular filtration. Hyperphosphatemia is associated with increased cardiovascular risk, being a direct stimulus to vascular calcification. Hypocalcemia may manifest, which is generally caused by stimulation of fibroblast growth factor-23. Osteocytes are responsible for the increased production of FGF23, which is a potent inhibitor of the enzyme 1-alpha-hydroxylase (responsible for the conversion of 25-hydroxycholecalciferol into 1,25 dihydroxyvitamin D3). Later, this progresses to secondary hyperparathyroidism, renal osteodystrophy, and vascular calcification that further impairs cardiac function. Metabolic acidosis (due to accumulation of sulfates, phosphates, uric acid etc.) may occur and cause altered enzyme activity by excess acid acting on enzymes; and also increased excitability of cardiac and neuronal membranes by the promotion of hyperkalemia due to excess acid (acidemia). Acidosis is also due to decreased capacity to generate enough ammonia from the cells of the proximal tubule. Iron deficiency anemia, which increases in prevalence as kidney function decreases, is especially prevalent in those requiring haemodialysis. It is multifactoral in cause, but includes increased inflammation, reduction in erythropoietin, and hyperuricemia leading to bone marrow suppression. People with CKD suffer from accelerated atherosclerosis and are more likely to develop cardiovascular disease than the general population. Patients afflicted with CKD and cardiovascular disease tend to have significantly worse prognoses than those suffering only from the latter. In some embodiments, the chronic kidney disease is a chronic kidney disease mineral bone disorder, a broad syndrome of interrelated skeletal, cardiovascular, and mineral-metabolic disorders arising from kidney disease. CKD-MBD encompasses various skeletal pathologies often referred to as renal osteodystrophy (ROD), which is a preferred embodiment for treatment with any of the polypeptides disclosed herein, or combinations with one or more supportive therapies or active agents. Depending on the relative contribution of different pathogenic factors, ROD is manifested as diverse pathologic patterns of bone remodeling (Hruska et al., 2008, Chronic kidney disease mineral bone disorder (CKD-MBD); in Rosen et al. (ed) Primer on the Metabolic Bone Diseases and Disorders of Mineral Metabolism, 7th ed. American Society for Bone and Mineral Research, Washington D.C., pp 343-349). At one end of the spectrum is ROD with uremic osteodystrophy and low bone turnover, characterized by a low number of active remodeling sites, profoundly suppressed bone formation, and low bone resorption. At the other extreme is ROD with hyperparathyroidism, high bone turnover, and osteitis fibrosa.

[0581] In some embodiments, the disclosure contemplates methods of treating one or more complications of a kidney-associated disease (e.g., Alport syndrome or focal segmental glomerulosclerosis) comprising administering to a patient in need thereof an effective amount of a variant ActRIIB protein in either homomeric or heteromeric form. In some embodiments, the disclosure contemplates methods of preventing one or more complications of a kidney-associated disease (e.g., Alport syndrome or focal segmental glomerulosclerosis) comprising administering to a patient in need thereof a variant ActRIIB protein in either homomeric or heteromeric form. In some embodiments, the disclosure contemplates methods of reducing the progression rate of a kidney-associated disease (e.g., Alport syndrome or focal segmental glomerulosclerosis) comprising administering to a patient in need thereof an effective amount of a variant ActRIIB protein in either homomeric or heteromeric form. In some embodiments, the disclosure contemplates methods of reducing the progression rate of one or more complications of a kidney-associated disease (e.g., Alport syndrome or focal segmental glomerulosclerosis) comprising administering to a patient in need thereof a variant ActRIIB protein in either homomeric or heteromeric form. In some embodiments, the disclosure contemplates methods of reducing the severity of a kidney-associated disease (e.g., Alport syndrome or focal segmental glomerulosclerosis) comprising administering to a patient in need thereof a variant ActRIIB protein in either homomeric or heteromeric form. In some embodiments, the disclosure contemplates methods of reducing the severity of one or more complications of a kidney-associated disease (e.g., Alport syndrome or focal segmental glomerulosclerosis) comprising administering to a patient in need thereof an effective amount of a variant ActRIIB protein in either homomeric or heteromeric form. Optionally, methods disclosed herein for treating, preventing, or reducing the progression rate and/or severity of a kidney-associated disease (e.g., Alport syndrome or focal segmental glomerulosclerosis), particularly treating, preventing, or reducing the progression rate and/or severity of one or more complications of a kidney-associated disease, may further comprise administering to the patient one or more supportive therapies or additional active agents for treating the kidney-associated disease.

[0582] In some embodiments, the disclosure relates to methods of monitoring a subject with a renal disease or condition (e.g., Alport syndrome, focal segmental glomerulosclerosis (FSGS), polycystic kidney disease, chronic kidney disease) is for albuminuria and/or proteinuria. Elevated protein levels in urine is a hallmark of many renal diseases or conditions. Annual monitoring for albuminuria and proteinuria are initiated beginning at one year of age for at-risk children. Proteinuria comprises a presence of abnormal quantities of protein in the urine. The most sensitive marker of proteinuria is elevated urine albumin (e.g., albuminuria). Albumin typically circulates in the blood, and only a trace of albumin is found in urine of subjects without a renal disease or condition. Moderate albuminuria is typically called microalbuminuria, while severe albuminuria is typically called macroalbuminuria. An albumin level above the upper limit value is called severe albuminuria or macroalbuminuria. In some embodiments, the present disclosure provides methods of treating a subject with one or more of albuminuria, proteinuria, microalbuminuria, and macroalbuminuria. In some embodiments, the present disclosure relates to methods of reducing severity, occurrence and/or duration of one or more of albuminuria, proteinuria, microalbuminuria, and macroalbuminuria in a subject in need thereof.

[0583] Measurements of albumin can have different units depending on how such measurements were taken. In some embodiments, albumin in urine is measured as a mass of albumin per time period of urine collected (e.g., mg/24 hr). In some embodiments, albumin in urine is measured as a mass of albumin per volume of urine collected (e.g., mg/L). In some embodiments, albumin in urine is measured as a mass of albumin per mass of creatinine in the urine (e.g., µg/mg of creatinine, termed albumin-creatine ratio, or ACR).

[0584] In some embodiments, a subject is administered a urine test to determine presence of a kidney disease or condition (e.g., Alport syndrome, focal segmental glomerulosclerosis (FSGS), polycystic kidney disease, chronic kidney disease). In some embodiments, a urine test comprises collection of urine over a specific time period (e.g., 24 hours). Moderate albuminuria or microalbuminuria comprises a level of albumin detected in the urine from a 24-hour urine collection that is between about 30 and about 300 mg albumin/24 hours and/or a level of albumin detected in the urine from a one minute urine collection that is between about 20 and about 200 µg albumin/1 minute. Severe albuminuria or macroalbuminuria comprises a level of albumin detected in the urine from a 24-hour urine collection that is above about 300 mg albumin/24 hours and/or a level of albumin detected in the urine from a 1 minute urine collection that is above about 200 µg albumin/1 minute. In some embodiments, the disclosure relates to methods of treating a subject with moderate albuminuria or microalbuminuria comprising a level of albumin detected in the urine from a 24-hour urine collection that is between about 30 and about 300 mg albumin/24 hours. In some embodiments, the disclosure relates to methods of treating a subject with moderate albuminuria or microalbuminuria comprising a level of albumin detected in the urine from a one minute urine collection that is between about 20 and about 200 µg albumin/1 minute. In some embodiments, the disclosure relates to methods of treating a subject with severe albuminuria or macroalbuminuria comprising a level of albumin detected in the urine from a 24-hour urine collection that is above about 300 mg albumin/24 hours. In some embodiments, the disclosure relates to methods of treating a subject with severe albuminuria or macroalbuminuria comprising a level of albumin detected in the urine from a 1 minute urine collection that is above about 200 µg albumin/1 minute.

[0585] In some embodiments, a urine test comprises a spot test using a single sample of urine. In some embodiments, a urine test comprises a dipstick test. In some embodiments, a urine dipstick test may provide an estimate of the level of albuminuria. In some embodiments, moderate albuminuria or microalbuminuria comprises a level of albumin detected in the urine from a spot sample that is between about 20 and about 200 mg albumin/L urine. In some embodiments, severe albuminuria or macroalbuminuria comprises a level of albumin detected in the urine from a spot sample that is above about 200 mg albumin/L urine. In some embodiments, the disclosure relates to methods of treating a subject with moderate albuminuria or microalbuminuria comprising a level of albumin detected in a urine from a spot sample that is between about 20 and about 200 mg albumin/L urine. In some embodiments, the disclosure relates to methods of treating a subject with severe albuminuria or macroalbuminuria comprising a level of albumin detected in the urine from a spot sample that is above about 200 mg albumin/L urine.

[0586] To compensate for variations in urine concentration in spot-check samples (versus a larger sample collection and/or a sample collection over time), comparing the amount of albumin in the sample against the urine concentration of creatinine is useful. This is called the albumin/creatinine ratio (ACR). In some embodiments, presence and/or severity of albuminuria is determined by a ratio of albumin to creatinine in the urine (e.g., albumin-creatinine ratio, ACR). ACR lower and upper limits can vary between men and women. ACR is measured as a unit of mass of albumin per a unit of mass of creatinine in the urine. In some embodiments, the disclosure provides methods of treating a subject with moderate albuminuria or microalbuminuria comprising an ACR of between about 30 and about 300 mg albumin/g of creatinine. In some embodiments, the disclosure provides methods of treating a subject with severe albuminuria or macroalbuminuria comprising an ACR of above about 300 mg albumin/g of creatinine. In some embodiments, a normal ACR is typically below 30 mg albumin/g creatinine. It is important to note that the units of measure for any albuminuria measurement can differ. For example, ACR may be measured as µg of albumin per mg of creatinine. Units of mg albumin/g creatinine are interchangeable with units of µg albumin/mg creatinine. ACR is sometimes provided without units, if both albumin and creatinine are provided as measurements of mass.

[0587] ACR can be measured as mass of albumin per concentration of creatinine in the urine. In some embodiments, the disclosure provides methods of treating moderate albuminuria or microalbuminuria comprising an ACR of between about 2.5 and about 35 mg albumin/mmol of creatinine in a subject in need thereof. In some embodiments, the disclosure provides methods of treating severe albuminuria or macroalbuminuria comprising an ACR of above about 35 mg albumin/mmol of creatinine in a subject in need thereof.

[0588] Disease stages describing the extent of renal damage and loss of function in a subject are typically assigned to subjects with renal diseases or conditions. Albuminuria stages are typically measured in terms of an ACR. In some embodiments, the present disclosure relates to methods of treating a subject with Stage A1 albuminuria. Stage A1 albuminuria comprises normal to moderately increased levels of albumin in the urine, with an ACR of less than 30 mg albumin/g creatinine (or less than 3 mg albumin/mmol creatinine). In some embodiments, the present disclosure relates to methods of treating a subject with Stage A2 albuminuria. Stage A2 comprises moderate albuminuria or microalbuminuria, with an ACR of between about 30 and about 300 mg albumin/g creatinine(or between about 3 and about 30 mg albumin/mmol creatinine). In some embodiments, the present disclosure relates to methods of treating a subject with Stage A3 albuminuria. Stage A3 comprises severe albuminuria or macroalbuminuria, with an ACR of greater than 300 mg albumin/g creatinine (or greater than 30 mg albumin/mmol creatinine). In some embodiments, administration of therapy to a subject with a renal disease or condition will delay or prevent development of end stage renal disease. In some embodiments, administration of therapy to a subject with a renal disease or condition will lower said subject’s albuminuria stage. In some embodiments, the present disclosure relates to methods of reducing severity, occurrence and/or duration of Stage A1 albuminuria. In some embodiments, the present disclosure relates to methods of reducing severity, occurrence and/or duration of Stage A2 albuminuria. In some embodiments, the present disclosure relates to methods of reducing severity, occurrence and/or duration of Stage A3 albuminuria. In some embodiments, the present disclosure provides methods of treating a subject with Stage A1 albuminuria that delay or prevent progression to Stage A2 albuminuria. In some embodiments, the present disclosure provides methods of treating a subject with Stage A2 albuminuria that delay or prevent progression to Stage A3 albuminuria. In some embodiments, the present disclosure provides methods of delaying and/or preventing worsening of albuminuria stage progression in a subject in need thereof. In some embodiments, the present disclosure provides an improvement in renal damage and/or a downgrade in albuminuria stage classification in a subject in need thereof. In some embodiments, the present disclosure provides methods of improving albuminuria classification in a subject by one or more stages.

[0589] In some embodiments, a subject has proteinuria in the nephrotic range. In some embodiments, proteinuria in the nephrotic range comprises between about 3 and about 3.5 g of protein in the urine per 24 hours per 1.73 m² body surface area. In some embodiments, a subject with nephrotic syndrome has proteinuria of greater than 3.5 g/24 hrs/1.73 m².

[0590] In some embodiments, the disclosure relates to methods of reducing an ACR in a subject with a renal disease or condition, comprising administering to a subject in need thereof an effective amount of a variant ActRIIB polypeptide (e.g., a variant ActRIIB homomultimer protein or a variant ActRIIB heteromultimer protein). In some embodiments, the method relates to reducing the subject’s ACR by between about 0.1 and about 2.5 mg albumin/g creatinine compared to a baseline measurement. In some embodiments, the method relates to reducing the subject’s ACR by between about 2.5 and about 3.5 mg albumin/g creatinine compared to a baseline measurement. In some embodiments, the method relates to reducing the subject’s ACR by between about 3.5 and about 5.0 mg albumin/g creatinine compared to a baseline measurement. In some embodiments, the method relates to reducing the subject’s ACR by between about 5.0 and about 7.5 mg albumin/g creatinine compared to a baseline measurement.. In some embodiments, the method relates to reducing the subject’s ACR by between about 7.5 and about 10.0 mg albumin/g creatinine compared to a baseline measurement. In some embodiments, the method relates to reducing the subject’s ACR by between about 10.0 and about 15.0 mg albumin/g creatinine compared to a baseline measurement. In some embodiments, the method relates to reducing the subject’s ACR by between about 15.0 and about 20.0 mg albumin/g creatinine compared to a baseline measurement. In some embodiments, the method relates to reducing the subject’s ACR by between about 20.0 and about 25.0 mg albumin/g creatinine compared to a baseline measurement. In some embodiments, the method relates to reducing the subject’s ACR by between about 30.0 and about 35.0 mg albumin/g creatinine compared to a baseline measurement. In some embodiments, the method relates to reducing the subject’s ACR by between about 40.0 and about 45.0 mg albumin/g creatinine compared to a baseline measurement. In some embodiments, the method relates to reducing the subject’s ACR by between about 45.0 and about 50.0 mg albumin/g creatinine compared to a baseline measurement. In some embodiments, the method relates to reducing the subject’s ACR by between about 50.0 and about 60.0 mg albumin/g creatinine compared to a baseline measurement. In some embodiments, the method relates to reducing the subject’s ACR by between about 60.0 and about 70.0 mg albumin/g creatinine compared to a baseline measurement. In some embodiments, the method relates to reducing the subject’s ACR by between about 70.0 and about 80.0 mg albumin/g creatinine compared to a baseline measurement. In some embodiments, the method relates to reducing the subject’s ACR by between about 80.0 and about 90.0 mg albumin/g creatinine compared to a baseline measurement. In some embodiments, the method relates to reducing the subject’s ACR by between about 90.0 and about 100.0 mg albumin/g creatinine compared to a baseline measurement.

[0591] In some embodiments, the method relates to reducing the subject’s ACR by at least 2.5% compared to a baseline measurement. In some embodiments, the method relates to reducing the subject’s ACR by at least 5% compared to a baseline measurement. In some embodiments, the method relates to reducing the subject’s ACR by at least 10% compared to a baseline measurement. In some embodiments, the method relates to reducing the subject’s ACR by at least 15% compared to a baseline measurement. In some embodiments, the method relates to reducing the subject’s ACR by at least 20% compared to a baseline measurement. In some embodiments, the method relates to reducing the subject’s ACR by at least 25% compared to a baseline measurement. In some embodiments, the method relates to reducing the subject’s ACR by at least 30% compared to a baseline measurement. In some embodiments, the method relates to reducing the subject’s ACR by at least 40% compared to a baseline measurement. In some embodiments, the method relates to reducing the subject’s ACR by at least 50% compared to a baseline measurement. In some embodiments, the method relates to reducing the subject’s ACR by at least 60% compared to a baseline measurement. In some embodiments, the method relates to reducing the subject’s ACR by at least 70% compared to a baseline measurement. In some embodiments, the method relates to reducing the subject’s ACR by at least 80% compared to a baseline measurement. In some embodiments, the method relates to reducing the subject’s ACR by at least 90% compared to a baseline measurement. In some embodiments, the method relates to reducing the subject’s ACR by at least 95% compared to a baseline measurement. In some embodiments, the method relates to reducing the subject’s ACR by at least 99% compared to a baseline measurement.

[0592] In some embodiments, total urine protein may be measured and compared against creatinine presence in the urine (e.g., UPCR). In some embodiments, UPCR is a measurement of proteinuria. In some embodiments, proteinuria comprises a urinary protein-creatinine ratio (UPCR) of greater than 0.2 mg/mg. In some embodiments, proteinuria comprises a urinary protein excretion of greater than 4 mg/m² per hour. In some embodiments, complete remission (CR) of a renal disease or condition is defined as a consistent UPCR measurement of less than 0.2 g protein/g creatinine. In some embodiments, a partial remission (PR) of a renal disease or condition is defined as having about a 50% reduction from baseline proteinuria and a consistent UPCR of less than about 2 g protein/g creatinine.

[0593] In some embodiments, the disclosure relates to methods of reducing an UPCR in a subject with a renal disease or condition, comprising administering to a subject in need thereof an effective amount of a variant ActRIIB polypeptide (e.g., a variant ActRIIB homomultimer protein or a variant ActRIIB heteromultimer protein). In some embodiments, the method relates to reducing the subject’s UPCR by between about 0.2 and about 1 mg/mg. In some embodiments, the method relates to reducing the subject’s UPCR by less than 0.5 mg/mg. In some embodiments, the method relates to reducing the subject’s UPCR by between about by between about 0.1 and about 100.0 mg urinary protein/mg creatinine. In some embodiments, the method relates to reducing the subject’s UPCR by between about 0.1 and about 2.5 mg urinary protein/mg creatinine. In some embodiments, the method relates to reducing the subject’s UPCR by between about 2.5 and about 3.5 mg urinary protein/mg creatinine. In some embodiments, the method relates to reducing the subject’s UPCR by between about 3.5 and about 5.0 mg urinary protein/mg creatinine. In some embodiments, the method relates to reducing the subject’s UPCR by between about 5.0 and about 7.5 mg urinary protein/mg creatinine. In some embodiments, the method relates to reducing the subject’s UPCR by between about 7.5 and about 10.0 mg urinary protein/mg creatinine. In some embodiments, the method relates to reducing the subject’s UPCR by between about 10.0 and about 15.0 mg urinary protein/mg creatinine. In some embodiments, the method relates to reducing the subject’s UPCR by between about 15.0 and about 20.0 mg urinary protein/mg creatinine. In some embodiments, the method relates to reducing the subject’s UPCR by between about 20.0 and about 25.0 mg urinary protein/mg creatinine. In some embodiments, the method relates to reducing the subject’s UPCR by between about 30.0 and about 35.0 mg urinary protein/mg creatinine. In some embodiments, the method relates to reducing the subject’s UPCR by between about 40.0 and about 45.0 mg urinary protein/mg creatinine. In some embodiments, the method relates to reducing the subject’s UPCR by between about 45.0 and about 50.0 mg urinary protein/mg creatinine. In some embodiments, the method relates to reducing the subject’s UPCR by between about 50.0 and about 60.0 mg urinary protein/mg creatinine. In some embodiments, the method relates to reducing the subject’s UPCR by between about 60.0 and about 70.0 mg urinary protein/mg creatinine. In some embodiments, the method relates to reducing the subject’s UPCR by between about 70.0 and about 80.0 mg urinary protein/mg creatinine. In some embodiments, the method relates to reducing the subject’s UPCR by between about 80.0 and about 90.0 mg urinary protein/mg creatinine. In some embodiments, the method relates to reducing the subject’s UPCR by between about 90.0 and about 100.0 mg urinary protein/mg creatinine.

[0594] In some embodiments, administration of therapy decreases urinary protein excretion. In some embodiments, the method relates to reducing the subject’s UPCR by at least 2.5% compared to a baseline measurement. In some embodiments, the method relates to reducing the subject’s UPCR by at least 5% compared to a baseline measurement. In some embodiments, the method relates to reducing the subject’s UPCR by at least 10% compared to a baseline measurement. In some embodiments, the method relates to reducing the subject’s UPCR by at least 15% compared to a baseline measurement. In some embodiments, the method relates to reducing the subject’s UPCR by at least 20% compared to a baseline measurement. In some embodiments, the method relates to reducing the subject’s UPCR by at least 25% compared to a baseline measurement. In some embodiments, the method relates to reducing the subject’s UPCR by at least 30% compared to a baseline measurement. In some embodiments, the method relates to reducing the subject’s UPCR by at least 40% compared to a baseline measurement. In some embodiments, the method relates to reducing the subject’s UPCR by at least 50% compared to a baseline measurement. In some embodiments, the method relates to reducing the subject’s UPCR by at least 60% compared to a baseline measurement. In some embodiments, the method relates to reducing the subject’s UPCR by at least 70% compared to a baseline measurement. In some embodiments, the method relates to reducing the subject’s UPCR by at least 80% compared to a baseline measurement. In some embodiments, the method relates to reducing the subject’s UPCR by at least 90% compared to a baseline measurement. In some embodiments, the method relates to reducing the subject’s UPCR by at least 95% compared to a baseline measurement. In some embodiments, the method relates to reducing the subject’s UPCR by at least 99% compared to a baseline measurement.

[0595] A subject may be administered a blood test to determine presence of a kidney disease or condition (e.g., Alport syndrome, focal segmental glomerulosclerosis (FSGS), polycystic kidney disease, chronic kidney disease), by determining how well the kidney is filtering the blood. Typically, a glomerular filtration rate (GFR) is determined, which measures the flow rate of filtered fluid (e.g., blood) through the kidney into the Bowman’s capsule. GFR is equal to the clearance rate of when any solute is freely filtered and is neither reabsorbed nor secreted by the kidneys. GFR is therefore a measurement of the quantity of the substance in the urine that originated from a calculable volume of blood, and is typically recorded in units of volume per time, e.g., milliliters per minute (mL/min). A normal range of GFR, adjusted for body surface area, is between about 100 and about 130 mL/min/1.73 m² in men, with an average GFR of 125 mL/min/1.73 m² in men. A normal range of GFR, adjusted for body surface area, is between about 90 and about 120 mL/min/1.73 m² in women younger than age 40. GFR measured by inulin clearance in children under 2 years old is about 110 mL/min/1.73 m², which progressively decreases. After age 40, GFR decreases progressively with age, by between about 0.4 and about 1.2 mL/min per year. GFR may also be calculated by comparative measurements of substances in the blood and urine, estimated using a blood test result (e.g., eGFR). In some embodiments, eGFR is measured using serum creatinine, age, ethnicity, and gender variables. In some embodiments, eGFR is measured using one or more of Cockcroft-Gault formula, Modification of Diet in Renal Disease (MDRD) formula, CKD-EPI formula, Mayo quadratic formula, and Schwartz formula.

[0596] A glomerular filtration rate (GFR) ≥ 60 ml/min/1.73 m2 is considered normal in a subject without chronic kidney disease if there is no kidney damage present, which comprises signs of damage seen in blood, urine, or imaging studies which includes lab albumin/creatinine ratio (ACR) ≥ 30. Subjects with a GFR <60 ml/min/1.73 m2 for at least 3 months are diagnosed as having chronic kidney disease.

[0597] In general, protein in the urine is regarded as an independent marker for decline of kidney function and cardiovascular disease, and the stages of chronic kidney disease (often used for renal diseases and/or conditions in general) is determined by measuring a subject’s GFR. In some embodiments, the present disclosure provides methods of treating stage 1 CKD. Stage 1 CKD comprises normal kidney function, kidney damage with normal or relatively high GFR (e.g., ≥90 ml/min/1.73 m²), and lower creatinine levels. Kidney damage may be defined as pathological abnormalities or markers of damage, including abnormalities in blood or urine tests or imaging studies. In some embodiments, the present disclosure provides methods of treating stage 2 CKD. Stage 2 CKD comprises mild reduction in kidney function and GFR (e.g., between about 60 and about 89 ml/min/1.73 m²) with kidney damage. In some embodiments, the present disclosure provides methods of treating stage 3 CKD. Stage 3 CKD comprises mild to moderate reduction in kidney function and GFR (e.g., between about 30 and about 59 ml/min/1.73 m²). Stage 3 CKD may be split into stages 3a (e.g., mild to moderate reduction in kidney function and GFR between about 45 and about 59 ml/min/1.73 m² and 3b (e.g., moderate to severe reduction in kidney function and GFR between about 30 and about 44 ml/min/1.73 m². In some embodiments, the present disclosure provides methods of treating stage 3a CKD. In some embodiments, the present disclosure provides methods of treating stage 3b CKD. In some embodiments, the present disclosure provides methods of treating stage 4 CKD. Stage 4 CKD comprises severe reduction in kidney function and GFR (e.g., between about 15 and about 29 ml/min/1.73 m²). In some embodiments, the present disclosure provides methods of treating stage 5 CKD. Stage 5 CKD comprises established kidney failure (e.g., GFR about <15 ml/min/1.73 m²), permanent kidney replacement therapy, end-stage renal disease. (ESRD), and high creatinine levels. In some embodiments, the present disclosure relates to methods of reducing severity, occurrence and/or duration of stage 1 CKD. In some embodiments, the present disclosure relates to methods of reducing severity, occurrence and/or duration of stage 2 CKD. In some embodiments, the present disclosure relates to methods of reducing severity, occurrence and/or duration of stage 3 CKD. In some embodiments, the present disclosure relates to methods of reducing severity, occurrence and/or duration of stage 3a CKD. In some embodiments, the present disclosure relates to methods of reducing severity, occurrence and/or duration of stage 3b CKD. In some embodiments, the present disclosure relates to methods of reducing severity, occurrence and/or duration of stage 4 CKD. In some embodiments, the present disclosure relates to methods of reducing severity, occurrence and/or duration of stage 5 CKD. In some embodiments, the present disclosure provides methods of treating a subject with Stage 1 CKD that delay or prevent progression to Stage 2 CKD. In some embodiments, the present disclosure provides methods of treating a subject with Stage 2 CKD that delay or prevent progression to Stage 3 CKD. In some embodiments, the present disclosure provides methods of treating a subject with Stage 2 CKD that delay or prevent progression to Stage 3a CKD. In some embodiments, the present disclosure provides methods of treating a subject with Stage 2 CKD that delay or prevent progression to Stage 3b CKD. In some embodiments, the present disclosure provides methods of treating a subject with Stage 3a CKD that delay or prevent progression to Stage 3b CKD. In some embodiments, the present disclosure provides methods of treating a subject with Stage 3 CKD that delay or prevent progression to Stage 4 CKD. In some embodiments, the present disclosure provides methods of treating a subject with Stage 3a CKD that delay or prevent progression to Stage 4 CKD. In some embodiments, the present disclosure provides methods of treating a subject with Stage 3b CKD that delay or prevent progression to Stage 4 CKD. In some embodiments, the present disclosure provides methods of treating a subject with Stage 4 CKD that delay or prevent progression to Stage 5 CKD. In some embodiments, the present disclosure provides methods of delaying and/or preventing worsening of CKD stage progression in a subject in need thereof. In some embodiments, the present disclosure provides an improvement in renal damage and/or a downgrade in CKD stage classification in a subject in need thereof. In some embodiments, the present disclosure provides methods of improving CKD classification in a subject by one or more stages.

[0598] In some embodiments, the disclosure relates to methods of increasing GFR and/or eGFR in a subject with a renal disease or condition, comprising administering to a subject in need thereof an effective amount of a variant ActRIIB polypeptide (e.g., a variant ActRIIB homomultimer protein or a variant ActRIIB heteromultimer protein). In some embodiments, the method relates to increasing the subject’s GFR and/or eGFR by at least 2.5% compared to a baseline measurement. In some embodiments, the method relates to increasing the subject’s GFR and/or eGFR by at least 5% compared to a baseline measurement. In some embodiments, the method relates to increasing the subject’s GFR and/or eGFR by at least 10% compared to a baseline measurement. In some embodiments, the method relates to increasing the subject’s GFR and/or eGFR by at least 15% compared to a baseline measurement. In some embodiments, the method relates to increasing the subject’s GFR and/or eGFR by at least 20% compared to a baseline measurement. In some embodiments, the method relates to increasing the subject’s GFR and/or eGFR by at least 25% compared to a baseline measurement. In some embodiments, the method relates to increasing the subject’s GFR and/or eGFR by at least 30% compared to a baseline measurement. In some embodiments, the method relates to increasing the subject’s GFR and/or eGFR by at least 40% compared to a baseline measurement. In some embodiments, the method relates to increasing the subject’s GFR and/or eGFR by at least 50% compared to a baseline measurement. In some embodiments, the method relates to increasing the subject’s GFR and/or eGFR by at least 60% compared to a baseline measurement. In some embodiments, the method relates to increasing the subject’s GFR and/or eGFR by at least 70% compared to a baseline measurement. In some embodiments, the method relates to increasing the subject’s GFR and/or eGFR by at least 80% compared to a baseline measurement. In some embodiments, the method relates to increasing the subject’s GFR and/or eGFR by at least 90% compared to a baseline measurement. In some embodiments, the method relates to increasing the subject’s GFR and/or eGFR by at least 95% compared to a baseline measurement. In some embodiments, the method relates to increasing the subject’s GFR and/or eGFR by at least 99% compared to a baseline measurement.

[0599] In some embodiments, the method relates to increasing the subject’s GFR by about 1 mL/min/1.73 m² compared to a baseline measurement. In some embodiments, the method relates to increasing the subject’s GFR by about 3 mL/min/1.73 m² compared to a baseline measurement. In some embodiments, the method relates to increasing the subject’s GFR by about 5 mL/min/1.73 m² compared to a baseline measurement. In some embodiments, the method relates to increasing the subject’s GFR by about 7 mL/min/1.73 m² compared to a baseline measurement. In some embodiments, the method relates to increasing the subject’s GFR by about 9 mL/min/1.73 m² compared to a baseline measurement. In some embodiments, the method relates to increasing the subject’s GFR by about 10 mL/min/1.73 m² compared to a baseline measurement. In some embodiments, the method relates to increasing the subject’s GFR by about 15 mL/min/1.73 m² compared to a baseline measurement. In some embodiments, the method relates to increasing the subject’s GFR by about 20 mL/min/1.73 m² compared to a baseline measurement. In some embodiments, the method relates to increasing the subject’s GFR by about 25 mL/min/1.73 m² compared to a baseline measurement. In some embodiments, the method relates to increasing the subject’s GFR by about 30 mL/min/1.73 m² compared to a baseline measurement. In some embodiments, the method relates to increasing the subject’s GFR by about 35 mL/min/1.73 m² compared to a baseline measurement. In some embodiments, the method relates to increasing the subject’s GFR by about 40 mL/min/1.73 m² compared to a baseline measurement. In some embodiments, the method relates to increasing the subject’s GFR by about 45 mL/min/1.73 m² compared to a baseline measurement. In some embodiments, the method relates to increasing the subject’s GFR by about 50 mL/min/1.73 m² compared to a baseline measurement. In some embodiments, the method relates to increasing the subject’s GFR by about 55 mL/min/1.73 m² compared to a baseline measurement. In some embodiments, the method relates to increasing the subject’s GFR by about 60 mL/min/1.73 m² compared to a baseline measurement. In some embodiments, the method relates to increasing the subject’s GFR by about 65 mL/min/1.73 m² compared to a baseline measurement. In some embodiments, the method relates to increasing the subject’s GFR by about 70 mL/min/1.73 m² compared to a baseline measurement. In some embodiments, the method relates to increasing the subject’s GFR by about 75 mL/min/1.73 m² compared to a baseline measurement. In some embodiments, the method relates to increasing the subject’s GFR by about 80 mL/min/1.73 m² compared to a baseline measurement. In some embodiments, the method relates to increasing the subject’s GFR by about 85 mL/min/1.73 m² compared to a baseline measurement. In some embodiments, the method relates to increasing the subject’s GFR by about 90 mL/min/1.73 m² compared to a baseline measurement. In some embodiments, the method relates to increasing the subject’s GFR by about 95 mL/min/1.73 m² compared to a baseline measurement. In some embodiments, the method relates to increasing the subject’s GFR by about 100 mL/min/1.73 m² compared to a baseline measurement.

[0600] In some embodiments, GFR and/or eGFR can be determined by injecting inulin or the inulin-analog sinistrin into plasma. Since both inulin and sinistrin are neither reabsorbed nor secreted by the kidney after glomerular filtration, their rate of excretion is directly proportional to the rate of filtration of water and solutes across the glomerular filter. In some embodiments, GFR and/or eGFR is measured using radioactive substances. In some embodiments, GFR and/or eGFR is measured using chromium-51. In some embodiments, GFR and/or eGFR is measured using renal or plasma clearance of 51Cr-EDTA. In some embodiments, GFR and/or eGFR is measured using technetium-99m. In some embodiments, GFR and/or eGFR is measured using 99mTc-DTPA. A benefit of using radioactive substances is they come close to the ideal properties of inulin (undergoing only glomerular filtration) but can be measured more practically with only a few urine or blood samples. Renal and plasma clearance 51Cr-EDTA has been shown to be accurate in comparison with inulin. In some embodiments, inulin clearance slightly overestimates glomerular function. In early stage renal disease, inulin clearance may remain normal due to hyperfiltration in the remaining nephrons. Incomplete urine collection is an important source of error in inulin clearance measurement.

[0601] Creatinine clearance rate (CCr or CrCl) is the volume of blood plasma that is cleared of creatinine per unit time and is a useful measure for approximating the GFR. Creatinine clearance exceeds GFR due to creatinine secretion, which can be blocked by cimetidine. Both GFR and CCr may be accurately calculated by comparative measurements of substances in the blood and urine, or estimated by formulas using just a blood test result (eGFR and eCCr).

[0602] In some embodiments, the disclosure relates to methods of reducing total kidney volume in subject with a renal disease or condition, comprising administering to a subject in need thereof an effective amount of a variant ActRIIB polypeptide (e.g., a variant ActRIIB homomultimer protein or a variant ActRIIB heteromultimer protein). In some embodiments, total kidney volume is measured by ultrasound. In some embodiments, total kidney volume is measured by magnetic resonance imaging (MRI). In some embodiments, total kidney volume reflects a sum volume of the kidney and cysts in renal diseases or disorders (e.g., ADPKD). In some embodiments, the method relates to reducing total kidney volume in the subject by at least 2.5% compared to a baseline measurement. In some embodiments, the method relates to reducing total kidney volume in the subject by at least 5% compared to a baseline measurement. In some embodiments, the method relates to reducing total kidney volume in the subject by at least 10% compared to a baseline measurement. In some embodiments, the method relates to reducing total kidney volume in the subject by at least 15% compared to a baseline measurement. In some embodiments, the method relates to reducing total kidney volume in the subject by at least 20% compared to a baseline measurement. In some embodiments, the method relates to reducing total kidney volume in the subject by at least 25% compared to a baseline measurement. In some embodiments, the method relates to reducing total kidney volume in the subject by at least 30% compared to a baseline measurement. In some embodiments, the method relates to reducing total kidney volume in the subject by at least 40% compared to a baseline measurement. In some embodiments, the method relates to reducing total kidney volume in the subject by at least 50% compared to a baseline measurement. In some embodiments, the method relates to reducing total kidney volume in the subject by at least 60% compared to a baseline measurement. In some embodiments, the method relates to reducing total kidney volume in the subject by at least 70% compared to a baseline measurement. In some embodiments, the method relates to reducing total kidney volume in the subject by at least 80% compared to a baseline measurement. In some embodiments, the method relates to reducing total kidney volume in the subject by at least 90% compared to a baseline measurement. In some embodiments, the method relates to reducing total kidney volume in the subject by at least 95% compared to a baseline measurement. In some embodiments, the method relates to reducing total kidney volume in the subject by at least 99% compared to a baseline measurement.

[0603] In some embodiments, blood urea nitrogen (BUN) is measured. In some embodiments, a BUN test measures the amount of urea nitrogen in blood. In some embodiments, if kidneys are impaired, the amount of urea nitrogen can be higher. In some embodiments, the disclosure relates to methods of reducing BUN in a subject with a renal disease or condition, comprising administering to a subject in need thereof an effective amount of a variant ActRIIB polypeptide (e.g., a variant ActRIIB homomultimer protein or a variant ActRIIB heteromultimer protein). In some embodiments, a normal BUN level for a human is between about 7 mg/dL and about 20 mg/dL. In some embodiments, the method relates to reducing BUN in the subject by at least 2.5% compared to a baseline measurement. In some embodiments, the method relates to reducing BUN in the subject by at least 5% compared to a baseline measurement. In some embodiments, the method relates to reducing BUN in the subject by at least 10% compared to a baseline measurement. In some embodiments, the method relates to reducing BUN in the subject by at least 15% compared to a baseline measurement. In some embodiments, the method relates to reducing BUN in the subject by at least 20% compared to a baseline measurement. In some embodiments, the method relates to reducing BUN in the subject by at least 25% compared to a baseline measurement. In some embodiments, the method relates to reducing BUN in the subject by at least 30% compared to a baseline measurement. In some embodiments, the method relates to reducing BUN in the subject by at least 40% compared to a baseline measurement. In some embodiments, the method relates to reducing BUN in the subject by at least 50% compared to a baseline measurement. In some embodiments, the method relates to reducing BUN in the subject by at least 60% compared to a baseline measurement. In some embodiments, the method relates to reducing BUN in the subject by at least 70% compared to a baseline measurement. In some embodiments, the method relates to reducing BUN in the subject by at least 80% compared to a baseline measurement. In some embodiments, the method relates to reducing BUN in the subject by at least 90% compared to a baseline measurement. In some embodiments, the method relates to reducing BUN in the subject by at least 95% compared to a baseline measurement. In some embodiments, the method relates to reducing BUN in the subject by at least 99% compared to a baseline measurement.

[0604] Optionally, methods disclosed herein for treating, preventing, or reducing the progression rate and/or severity of a renal disease or condition (e.g., Alport syndrome, focal segmental glomerulosclerosis (FSGS), polycystic kidney disease, chronic kidney disease), particularly treating, preventing, or reducing the progression rate and/or severity of one or more complications of a renal disease or condition, may further comprise administering to the subject one or more additional active agents and/or supportive therapies for treating a renal disease or condition. In some embodiments, a subject is administered an additional active agent and/or supportive therapy for treating a renal disease or condition (e.g., Alport syndrome, focal segmental glomerulosclerosis (FSGS), polycystic kidney disease, chronic kidney disease). In some embodiments, ARBs and ACE inhibitors are mainstays of therapy for renal diseases and conditions (e.g., Alport syndrome, focal segmental glomerulosclerosis (FSGS), polycystic kidney disease, chronic kidney disease), with beta-blockade and calcium-channel blockers as second-line therapy. In some embodiments, as third-line therapy, thiazides are preferred in subjects with normal renal function, while loop diuretics are preferred in subjects with impaired renal function.

[0605] In some embodiments, a subject with a renal disease or condition (e.g., Alport syndrome, focal segmental glomerulosclerosis (FSGS), polycystic kidney disease, chronic kidney disease) is administered an antagonist of the Renin-angiotensin-aldosterone system (RAAS). In some embodiments, RAAS inhibitors include, but are not limited to, angiotensin antagonists (e.g., angiotensin blockade therapy, angiotensin system inhibitor, renin-angiotensin system inhibitor, angiotensin II blockade, angiotensin II type 1 receptor blocker, ARB, angiotensin II receptor antagonist, AT₁ receptor antagonist, or a sartan) and an angiotensin-converting enzyme (ACE) inhibitor. In some embodiments, RAAS antagonism and particularly, the combination of an ACE inhibitor and ARB, will lower GFR by reducing efferent arteriolar vascular tone and thus, reducing intraglomerular capillary pressure, the driving force for glomerular filtration. Thus, a modest decrease in GFR may be tolerated, providing evidence that RAAS antagonism has been achieved.

[0606] In some embodiments, a subject is administered an angiotensin antagonist (e.g., angiotensin receptor blocker, ARB), when the subject shows signs of proteinuria. In some embodiments, an ARB reduces proteinuria in subjects with a renal disease or condition. In some embodiments, an angiotensin antagonist diminishes the rate of glomerulosclerosis in subjects with a renal disease or condition. In some embodiments, administration of an ARB decreases renal disease progression. In some embodiments, a subject is administered one or more ARBs selected from the group consisting of losartan, irbesartan, olmesartan, candesartan, valsartan, fimasartan, azilsartan, salprisartan, and telmisartan. In some embodiments a subject is administered losartan. In some embodiments, a subject is administered irbesartan. In some embodiments, a subject is administered olmesartan. In some embodiments, a subject is administered candesartan. In some embodiments, a subject is administered valsartan. In some embodiments, a subject is administered fimasartan. In some embodiments, a subject is administered azilsartan. In some embodiments, a subject is administered salprisartan. In some embodiments, a subject is administered telmisartan.

[0607] In some embodiments, a subject with a renal disease or condition is administered an ACE inhibitor. In some embodiments, an ACE inhibitor is selected from the group consisting of benazepril, captopril, enalapril, lisinopril, perindopril, ramipril (e.g., ramipen), trandolapril, and zofenopril. In some embodiments, a subject is administered benazepril. In some embodiments, a subject is administered captopril. In some embodiments, a subject is administered enalapril. In some embodiments, a subject is administered lisinopril. In some embodiments, a subject is administered perindopril. In some embodiments, a subject is administered ramipril. In some embodiments, a subject is administered trandolapril. In some embodiments, a subject is administered zofenopril. In some embodiments, administration of an ACE inhibitor delays dialysis in a subject with proteinuria and normal kidney function. In some embodiments, administration of an ACE inhibitor slows decline in renal function in a subject. In some embodiments, administration of an ACE inhibitor reduces proteinuria in a subject. In some embodiments, administration of an ACE inhibitor decreases kidney damage in a subject.

[0608] In some embodiments, a subject with a renal disease or condition is administered an ARB and an ACE inhibitor. In some embodiments, a subject with a renal disease or condition comprising proteinuria and/or microalbuminuria is administered an ARB and an ACE inhibitor.

[0609] In some embodiments, an alternative approach to angiotensin antagonism is to combine an ACE inhibitor and/or ARB with an aldosterone antagonist.

[0610] In some embodiments, a subject with a renal disease or condition (e.g., primary FSGS) is administered an immunosuppressive treatment. In some embodiments, subjects with a renal disease or condition are treated with immunosuppressive medications. In some embodiments, immunosuppression is not administered to subjects with secondary FSGS. In some embodiments, immunosuppressants are not administered to subjects that do not have primary FSGS. In some embodiments, an immunosuppressant is selected from the group consisting of corticosteroids, calcineurin inhibitors, janus kinase inhibitors, mammalian target of rapamycin (mTOR) inhibitors, IMDH inhibitors, and biologics (including, but not limited to monoclonal antibodies).

[0611] In some embodiments, a subject with a renal disease or condition is administered a corticosteroid. In some embodiments, a glucocorticoid is a corticosteroid. In some embodiments, a subject with a renal disease or condition is administered one or more glucocorticoids. In some embodiments, administration of a glucocorticoid is an initial therapy. In some embodiments, a glucocorticoid is selected from the group consisting of beclomethasone, betamethasone, budesonide, cortisone, dexamethasone, hydrocortisone, methylprednisolone, prednisolone, methylprednisone, prednisone, and triamcinolone. In some embodiments, a subject with a renal disease or condition is administered prednisone. In some embodiments, a subject with a renal disease or condition is administered prednisolone.

[0612] In some embodiments, a calcineurin inhibitor is selected from the group consisting of cyclosporine (e.g., cyclosporin, ciclosporin, ciclosporine, Neoral, Sandimmune, SangCya) and tacrolimus (e.g., Astagraf XL, Envarsus XR, Prograf). In some embodiments, calcineurin inhibitors are administered to steroid-sensitive subjects who cannot tolerate continued steroid therapy, and/or to subjects with steroid-resistant renal disease (e.g. steroid-resistant FSGS). In some embodiments, a subject with a renal disease or condition is administered cyclosporine. In some embodiments, a subject with a renal disease or condition is administered tacrolimus.

[0613] In some embodiments, a subject with a renal disease or condition maybe administered a combination of one or more corticosteroids and/or calcineurin inhibitors. In some embodiments, a subject with a kidney disease or condition may be administered cyclosporine and prednisone. In some embodiments, a subject with a renal disease or condition is administered tacrolimus and prednisone. In some embodiments, cyclosporine and prednisone are administered to preserve renal function assessed as creatinine clearance.

[0614] In some embodiments, treatment with mycophenolate mofetil (MMF) combined with glucocorticoids may be beneficial in subjects who cannot take calcineurin inhibitors. In some embodiments, a subject with a renal disease or condition is administered mycophenolate mofetil (MMF) in combination with one or more glucocorticoids. In some embodiments, a subject with a renal disease or condition is administered MMF and prednisone. In some embodiments, a subject with a renal disease or condition is administered prednisolone and MMF.

[0615] In some embodiments, a subject with a renal disease or condition is administered cyclophosphamide and/or prednisone. In some embodiments, a subject with a renal disease or condition is administered prednisolone and/or chlorambucil. In some embodiments, a subject with a renal disease or condition is administered cyclophosphamide. In some embodiments, a subject with a renal disease or condition is administered chlorambucil.

[0616] In some embodiments, a janus kinase inhibitor is tofacitinib (e.g., Xeljanz).

[0617] In some embodiments, an mTOR inhibitor is selected from the group consisting of sirolimus (e.g., Rapamune) and everolimus (e.g., Afinitor, Zortress).

[0618] In some embodiments, an IMDH inhibitor is selected from the group consisting of azathioprine (e.g., Azasan, Imuran), leflunomide (e.g., Arava), and mycophenolate (e.g., CellCept, Myfortic).

[0619] In some embodiments, a biologic is selected from the group consisting of abatacept (e.g., Orencia), adalimumab (e.g., Humira), anakinra (e.g., Kineret), basiliximab (e.g., Simulect), certolizumab (e.g., Cimzia), daclizumab (e.g., Zinbryta), etanercept (e.g., Enbrel), fresolimumab, golimumab (e.g., Simponi), infliximab (e.g., Remicade), ixekizumab (e.g., Taltz), natalizumab (e.g., Tysabri), rituximab (e.g., Rituxan), secukinumab (e.g., Cosentyx), tocilizumab (e.g., Actemra), ustekinumab (e.g., Stelara), and vedolizumab (e.g., Entyvio).

[0620] In some embodiments, a subject with a renal disease or condition (e.g., Alport syndrome, focal segmental glomerulosclerosis (FSGS), polycystic kidney disease, chronic kidney disease) is administered a statin (e.g., benazepril, valsartan, Fluvastatin, pravastatin).

[0621] In some embodiments, a subject with a renal disease or condition (e.g., Alport syndrome, focal segmental glomerulosclerosis (FSGS), polycystic kidney disease, chronic kidney disease) is administered bardoxolone methyl. Bardoxolone methyl is an activator of the KEAP1-Nrf2 pathway and bardoxolone methyl also inhibits the pro-inflammatory transcription factor NF-xB.

[0622] In some embodiments, a subject with a renal disease or condition (e.g., Alport syndrome, focal segmental glomerulosclerosis (FSGS), polycystic kidney disease, chronic kidney disease) is administered Achtar gel. Achtar gel was approved in the 1950s by the US Food and Drug Administration for nephrotic syndrome under criteria that were less stringent than required today. In some embodiments, some case studies suggest limited efficacy of Acthar in some subjects with FSGS. In some embodiments, a subject with FSGS is administered Achtar gel.

[0623] In some embodiments, a subject with ADPKD is administered Tolvaptan (e.g., OPC-41061). In some embodiments, Tolvaptan has demonstrated a slower decline than placebo in the eGFR over a one year period in patients with late-stage chronic kidney disease but is associated with elevations of bilirubin and alanine aminotransferase levels.

[0624] In some embodiments, a subject a renal disease or condition (e.g., Alport syndrome, focal segmental glomerulosclerosis (FSGS), polycystic kidney disease, chronic kidney disease) is administered one or more of abatacept in combination with sparsentan, aliskiren, allopurinol, ANG-3070, atorvastatin, bleselumab, bosutinib, CCX140-B, CXA-10, D6-25-hydroxyvitamin D3, dapagliflozin, dexamethasone in combination with MMF, emodin, FG-3019, FK506, FK-506 and MMF, FT-011, galactose, GC1008, GFB-887, isotretinoin, lademirsen, lanreotide, levamisole, lixivaptan, losmapimod, metformin, mizorbine, N-acetylmannosamine, octreotide, paricalcitol, PF-06730512, pioglitazone, propagermanium, propagermanium and irbesartan, rapamune, rapamycin, RE-021 (e.g., sparsentan), RG012, rosiglitazone (e.g., Avandia), saquinivir, SAR339375, somatostatin, spironolactone, tesevatinib (KD019), tetracosactin, tripterygium wilfordii (TW), valproic acid, VAR-200, venglustat (GZ402671), verinurad, voclosporin, or VX-147.

[0625] In some embodiments, a subject with a renal disease or condition (e.g., Alport syndrome, focal segmental glomerulosclerosis (FSGS), polycystic kidney disease, chronic kidney disease) undergoes kidney dialysis. In some embodiments, a subject with a renal disease or condition (e.g., Alport syndrome, focal segmental glomerulosclerosis (FSGS), polycystic kidney disease, chronic kidney disease) undergoes a kidney transplant. In some embodiments, a subject with ESRD undergoes a kidney transplantation. In some embodiments, a subject with a kidney transplant does not experience recurrent renal disease. In some embodiments, a subject with a kidney transplant contracts anti-glomerular basement membrane antibody disease. In some embodiments, anti-glomerular basement membrane antibody disease occurs within one year after kidney transplantation. In some embodiments, a subject with anti-glomerular basement membrane antibody disease is administered methylprednisone and/or cyclophosphamide. In some embodiments, a subject with anti-glomerular basement membrane antibody disease undergoes plasmapheresis.

[0626] In some embodiments, a subject with a renal disease or condition (e.g., Alport syndrome, focal segmental glomerulosclerosis (FSGS), polycystic kidney disease, chronic kidney disease) is administered mesenchymal stem cell therapy. In some embodiments, a subject with a renal disease or condition (e.g., Alport syndrome, focal segmental glomerulosclerosis (FSGS), polycystic kidney disease, chronic kidney disease) is administered bone marrow stem cells. In some embodiments, a subject with a renal disease or condition (e.g., Alport syndrome, focal segmental glomerulosclerosis (FSGS), polycystic kidney disease, chronic kidney disease) undergoes lipoprotein removal. In some embodiments, a subject with a renal disease or condition (e.g., Alport syndrome, focal segmental glomerulosclerosis (FSGS), polycystic kidney disease, chronic kidney disease) is administered a Liposorber LA-15 device. In some embodiments, a subject with a renal disease or condition (e.g., Alport syndrome, focal segmental glomerulosclerosis (FSGS), polycystic kidney disease, chronic kidney disease) undergoes plasmapheresis. In some embodiments, a subject with a renal disease or condition (e.g., Alport syndrome, focal segmental glomerulosclerosis (FSGS), polycystic kidney disease, chronic kidney disease) undergoes plasma exchange. In some embodiments, a subject with a renal disease or condition (e.g., Alport syndrome, focal segmental glomerulosclerosis (FSGS), polycystic kidney disease, chronic kidney disease) undergoes a change in diet (e.g., dietary sodium intake).

[0627] In some embodiments, methods of the present disclosure delay clinical worsening of a renal disease or condition (e.g., Alport syndrome, focal segmental glomerulosclerosis (FSGS), polycystic kidney disease, chronic kidney disease) in a subject. In some embodiments, methods of the present disclosure reduce the risk of hospitalization for one or more complications associated with a renal disease or condition (e.g., Alport syndrome, focal segmental glomerulosclerosis (FSGS), polycystic kidney disease, chronic kidney disease).

### 7. Pharmaceutical Compositions

[0628] In certain embodiments, compounds of the present disclosure (e.g., variant ActRIIB proteins in either homomeric or heteromeric forms) are formulated with a pharmaceutically acceptable carrier. For example, a variant ActRIIB protein can be administered alone or as a component of a pharmaceutical formulation (therapeutic composition). The subject compounds may be formulated for administration in any convenient way for use in human or veterinary medicine.

[0629] In certain embodiments, the disclosure relates to pharmaceutical preparations comprising an ActRIIB polypeptide, including variant ActRIIB polypeptides as well as homomultimer and heteromultimers comprising the same, and a pharmaceutically acceptable carrier. In some embodiments, pharmaceutical preparations comprising one or more variant ActRIIB heteromulitmers comprises less than about 10%, 9%, 8%, 7%, 6%, 5%, 4%, 3%, 2%, or less than about 1% homomultimers.

[0630] In certain embodiments, the therapeutic method described herein includes administering the composition topically, systemically, or locally as an implant or device. When administered, the therapeutic composition for use in this disclosure is, of course, in a pyrogen-free, physiologically acceptable form. Further, the composition may desirably be encapsulated or injected in a viscous form for delivery to a target tissue site (e.g., renal, pulmonary, cardiac, bone, cartilage, muscle, fat or neurons), for example, a site having a tissue damage. Topical administration may be suitable for wound healing and tissue repair. Therapeutically useful agents other than the variant ActRIIB proteins which may also optionally be included in the composition as described above, may alternatively or additionally, be administered simultaneously or sequentially with the subject compounds (e.g., variant ActRIIB proteins in either homomeric or heteromeric forms) in the methods described herein.

[0631] In certain embodiments, compositions of the present disclosure may include a matrix capable of delivering one or more therapeutic compounds (e.g., variant ActRIIB proteins in either homomeric or heteromeric forms) to a target tissue site, providing a structure for the developing tissue and optimally capable of being resorbed into the body. For example, the matrix may provide slow release of the variant ActRIIB proteins. Such matrices may be formed of materials presently in use for other implanted medical applications.

[0632] The choice of matrix material is based on biocompatibility, biodegradability, mechanical properties, cosmetic appearance and interface properties. The particular application of the subject compositions will define the appropriate formulation. Potential matrices for the compositions may be biodegradable and chemically defined calcium sulfate, tricalciumphosphate, hydroxyapatite, polylactic acid and polyanhydrides. Other potential materials are biodegradable and biologically well defined, such as bone or dermal collagen. Further matrices are comprised of pure proteins or extracellular matrix components. Other potential matrices are non-biodegradable and chemically defined, such as sintered hydroxyapatite, bioglass, aluminates, or other ceramics. Matrices may be comprised of combinations of any of the above mentioned types of material, such as polylactic acid and hydroxyapatite or collagen and tricalciumphosphate. The bioceramics may be altered in composition, such as in calcium-aluminate-phosphate and processing to alter pore size, particle size, particle shape, and biodegradability.

[0633] In certain embodiments, variant ActRIIB proteins described herein (e.g., variant ActRIIB proteins in either homomeric or heteromeric forms) can be administered orally, e.g., in the form of capsules, cachets, pills, tablets, lozenges (using a flavored basis, usually sucrose and acacia or tragacanth), powders, granules, or as a solution or a suspension in an aqueous or non-aqueous liquid, or as an oil-in-water or water-in-oil liquid emulsion, or as an elixir or syrup, or as pastilles (using an inert base, such as gelatin and glycerin, or sucrose and acacia) and/or as mouth washes and the like, each containing a predetermined amount of an agent as an active ingredient. An agent may also be administered as a bolus, electuary or paste.

[0634] In solid dosage forms for oral administration (capsules, tablets, pills, dragees, powders, granules, and the like), one or more variant ActRIIB proteins of the present disclosure (e.g., variant ActRIIB proteins in either homomeric or heteromeric forms) may be mixed with one or more pharmaceutically acceptable carriers, such as sodium citrate or dicalcium phosphate, and/or any of the following: (1) fillers or extenders, such as starches, lactose, sucrose, glucose, mannitol, and/or silicic acid; (2) binders, such as, for example, carboxymethylcellulose, alginates, gelatin, polyvinyl pyrrolidone, sucrose, and/or acacia; (3) humectants, such as glycerol; (4) disintegrating agents, such as agar-agar, calcium carbonate, potato or tapioca starch, alginic acid, certain silicates, and sodium carbonate; (5) solution retarding agents, such as paraffin; (6) absorption accelerators, such as quaternary ammonium compounds; (7) wetting agents, such as, for example, cetyl alcohol and glycerol monostearate; (8) absorbents, such as kaolin and bentonite clay; (9) lubricants, such a talc, calcium stearate, magnesium stearate, solid polyethylene glycols, sodium lauryl sulfate, and mixtures thereof; and (10) coloring agents. In the case of capsules, tablets and pills, the pharmaceutical compositions may also comprise buffering agents. Solid compositions of a similar type may also be employed as fillers in soft and hard-filled gelatin capsules using such excipients as lactose or milk sugars, as well as high molecular weight polyethylene glycols and the like.

[0635] Liquid dosage forms for oral administration include pharmaceutically acceptable emulsions, microemulsions, solutions, suspensions, syrups, and elixirs. In addition to the active ingredient, the liquid dosage forms may contain inert diluents commonly used in the art, such as water or other solvents, solubilizing agents and emulsifiers, such as ethyl alcohol, isopropyl alcohol, ethyl carbonate, ethyl acetate, benzyl alcohol, benzyl benzoate, propylene glycol, 1,3-butylene glycol, oils (in particular, cottonseed, groundnut, corn, germ, olive, castor, and sesame oils), glycerol, tetrahydrofuryl alcohol, polyethylene glycols and fatty acid esters of sorbitan, and mixtures thereof. Besides inert diluents, the oral compositions can also include adjuvants such as wetting agents, emulsifying and suspending agents, sweetening, flavoring, coloring, perfuming, and preservative agents.

[0636] Suspensions, in addition to the active compounds, may contain suspending agents such as ethoxylated isostearyl alcohols, polyoxyethylene sorbitol, and sorbitan esters, microcrystalline cellulose, aluminum metahydroxide, bentonite, agar-agar and tragacanth, and mixtures thereof.

[0637] Certain compositions disclosed herein may be administered topically, either to skin or to mucosal membranes. The topical formulations may further include one or more of the wide variety of agents known to be effective as skin or stratum corneum penetration enhancers. Examples of these are 2-pyrrolidone, N-methyl-2-pyrrolidone, dimethylacetamide, dimethylformamide, propylene glycol, methyl or isopropyl alcohol, dimethyl sulfoxide, and azone. Additional agents may further be included to make the formulation cosmetically acceptable. Examples of these are fats, waxes, oils, dyes, fragrances, preservatives, stabilizers, and surface active agents. Keratolytic agents such as those known in the art may also be included. Examples are salicylic acid and sulfur.

[0638] Dosage forms for the topical or transdermal administration include powders, sprays, ointments, pastes, creams, lotions, gels, solutions, and patches. The active compound may be mixed under sterile conditions with a pharmaceutically acceptable carrier, and with any preservatives, buffers, or propellants which may be required. The ointments, pastes, creams and gels may contain, in addition to a subject compound described herein (e.g., variant ActRIIB proteins in either homomeric or heteromeric forms), excipients, such as animal and vegetable fats, oils, waxes, paraffins, starch, tragacanth, cellulose derivatives, polyethylene glycols, silicones, bentonites, silicic acid, talc and zinc oxide, or mixtures thereof.

[0639] Powders and sprays can contain, in addition to a subject compound, excipients such as lactose, talc, silicic acid, aluminum hydroxide, calcium silicates, and polyamide powder, or mixtures of these substances. Sprays can additionally contain customary propellants, such as chlorofluorohydrocarbons and volatile unsubstituted hydrocarbons, such as butane and propane.

[0640] In certain embodiments, pharmaceutical compositions suitable for parenteral administration may comprise one or more variant ActRIIB proteins in combination with one or more pharmaceutically acceptable sterile isotonic aqueous or nonaqueous solutions, dispersions, suspensions or emulsions, or sterile powders which may be reconstituted into sterile injectable solutions or dispersions just prior to use, which may contain antioxidants, buffers, bacteriostats, solutes which render the formulation isotonic with the blood of the intended recipient or suspending or thickening agents. Examples of suitable aqueous and nonaqueous carriers which may be employed in the pharmaceutical compositions described herein include water, ethanol, polyols (such as glycerol, propylene glycol, polyethylene glycol, and the like), and suitable mixtures thereof, vegetable oils, such as olive oil, and injectable organic esters, such as ethyl oleate. Proper fluidity can be maintained, for example, by the use of coating materials, such as lecithin, by the maintenance of the required particle size in the case of dispersions, and by the use of surfactants. In some embodiments, a parenteral route of administration is selected from the group consisting of intramuscular, intraperitoneal, intradermal, intravitreal, epidural, intracerebral, intra-arterial, intraarticular, intra-cavernous, intra-lesional, intraosseous, intraocular, intrathecal, intravenous, transdermal, trans-mucosal, extra-amniotic administration, subcutaneous, and combinations thereof. In some embodiments, a parenteral route of administration is subcutaneous. In some embodiments, a parenteral route of administration is a subcutaneous injection. In some embodiments, compositions of the present disclosure are administered by subcutaneous injection.

[0641] The compositions described herein may also contain adjuvants, such as preservatives, wetting agents, emulsifying agents and dispersing agents. Prevention of the action of microorganisms may be ensured by the inclusion of various antibacterial and antifungal agents, for example, paraben, chlorobutanol, phenol sorbic acid, and the like. It may also be desirable to include isotonic agents, such as sugars, sodium chloride, and the like into the compositions. In addition, prolonged absorption of the injectable pharmaceutical form may be brought about by the inclusion of agents which delay absorption, such as aluminum monostearate and gelatin.

[0642] It is understood that the dosage regimen will be determined by the attending physician considering various factors which modify the action of the subject compounds described herein (e.g., variant ActRIIB proteins in either homomeric or heteromeric forms). The various factors will depend upon the disease to be treated. In the case of muscle disorders, factors may include, but are not limited to, amount of muscle mass desired to be formed, the muscles most affected by disease, the condition of the deteriorated muscle, the patient’s age, sex, and diet, time of administration, and other clinical factors. The addition of other known growth factors to the final composition, may also affect the dosage. Progress can be monitored by periodic assessment of muscle growth and/or repair, for example, by strength testing, MRI assessment of muscle size and analysis of muscle biopsies.

[0643] In certain embodiments, one or more variant ActRIIB proteins (e.g., variant ActRIIB proteins in either homomeric or heteromeric forms) can be administered, in combination (same formulation or in separate formulations), concomitantly, sequentially, or on different schedules. In addition, variant ActRIIB proteins can be administered with another type of therapeutic agents, for example, a cartilage-inducing agent, a bone-inducing agent, a muscle-inducing agent, a fat-reducing, a neuron-inducing agent, an agent for pulmonary disease (e.g., sildenafil), an agent for renal disease, or an agent for cardiac disease. The two types of compounds may be administered simultaneously or at different times. It is expected that the variant ActRIIB proteins described herein may act in concert with or perhaps synergistically with another therapeutic agent.

[0644] In a specific example, a variety of osteogenic, cartilage-inducing and bone-inducing factors have been described, particularly bisphosphonates. See e.g., European Patent Application Nos. 148,155 and 169,016. For example, other factors that can be combined with the subject variant ActRIIB proteins (e.g., variant ActRIIB proteins in either homomeric or heteromeric forms) include various growth factors such as epidermal growth factor (EGF), platelet derived growth factor (PDGF), transforming growth factors (TGF-α and TGF-β), and insulin-like growth factor (IGF).

[0645] In certain embodiments, the present disclosure also provides gene therapy for the in vivo production of variant ActRIIB proteins (e.g., variant ActRIIB proteins in either homomeric or heteromeric forms). Such therapy would achieve its therapeutic effect by introduction of the variant ActRIIB polynucleotide sequences into cells or tissues having the disorders as listed above. Delivery of variant ActRIIB polynucleotide sequences can be achieved using a recombinant expression vector such as a chimeric virus or a colloidal dispersion system. Preferred for therapeutic delivery of variant ActRIIB polynucleotide sequences is the use of targeted liposomes.

[0646] Various viral vectors which can be utilized for gene therapy as taught herein include adenovirus, herpes virus, vaccinia, or, preferably, an RNA virus such as a retrovirus. Preferably, the retroviral vector is a derivative of a murine or avian retrovirus. Examples of retroviral vectors in which a single foreign gene can be inserted include, but are not limited to: Moloney murine leukemia virus (MoMuLV), Harvey murine sarcoma virus (HaMuSV), murine mammary tumor virus (MuMTV), and Rous Sarcoma Virus (RSV). A number of additional retroviral vectors can incorporate multiple genes. All of these vectors can transfer or incorporate a gene for a selectable marker so that transduced cells can be identified and generated. Retroviral vectors can be made target-specific by attaching, for example, a sugar, a glycolipid, or a protein. Preferred targeting is accomplished by using an antibody. Those of skill in the art will recognize that specific polynucleotide sequences can be inserted into the retroviral genome or attached to a viral envelope to allow target specific delivery of the retroviral vector containing the variant ActRIIB polynucleotide. In one preferred embodiment, the vector is targeted to renal, pulmonary, cardiac, bone, cartilage, muscle or neuron cells/tissues.

[0647] Alternatively, tissue culture cells can be directly transfected with plasmids encoding the retroviral structural genes gag, pol and env, by conventional calcium phosphate transfection. These cells are then transfected with the vector plasmid containing the genes of interest. The resulting cells release the retroviral vector into the culture medium.

[0648] Another targeted delivery system for variant ActRIIB polynucleotides (e.g., variant ActRIIB proteins in either homomeric or heteromeric forms) is a colloidal dispersion system. Colloidal dispersion systems include macromolecule complexes, nanocapsules, microspheres, beads, and lipid-based systems including oil-in-water emulsions, micelles, mixed micelles, and liposomes. The preferred colloidal system of this disclosure is a liposome. Liposomes are artificial membrane vesicles which are useful as delivery vehicles in vitro and in vivo. RNA, DNA and intact virions can be encapsulated within the aqueous interior and be delivered to cells in a biologically active form (see e.g., Fraley, et al., Trends Biochem. Sci., 6:77, 1981). Methods for efficient gene transfer using a liposome vehicle, are known in the art, see e.g., Mannino, et al., Biotechniques, 6:682, 1988. The composition of the liposome is usually a combination of phospholipids, usually in combination with steroids, especially cholesterol. Other phospholipids or other lipids may also be used. The physical characteristics of liposomes depend on pH, ionic strength, and the presence of divalent cations.

[0649] Examples of lipids useful in liposome production include phosphatidyl compounds, such as phosphatidylglycerol, phosphatidylcholine, phosphatidylserine, phosphatidylethanolamine, sphingolipids, cerebrosides, and gangliosides. Illustrative phospholipids include egg phosphatidylcholine, dipalmitoylphosphatidylcholine, and distearoylphosphatidylcholine. The targeting of liposomes is also possible based on, for example, organ-specificity, cell-specificity, and organelle-specificity and is known in the art.

### Exemplification

[0650] The invention now being generally described, it will be more readily understood by reference to the following examples, which are included merely for purposes of illustration of certain embodiments and embodiments of the present invention, and are not intended to limit the invention.

### Example 1. Generation of an ActRIIB-Fc Fusion Protein

[0651] Applicants constructed a soluble ActRIIB fusion protein that has the extracellular domain of human ActRIIB fused to a human GlFc domain with a linker (three glycine amino acids) in between. The construct is referred to as ActRIIB-G1Fc.

[0652] ActRIIB-G1Fc is shown below in SEQ ID NO: 5 (with the linker underlined) as purified from CHO cell lines:

GRGEAETRECIYYNANWELERTNQSGLERCEGEQDKRLHCYASWRNSSGT
IELVKKGCWLDDFNCYDRQECVATEENPQVYFCCCEGNFCNERFTHLPEA
GGPEVTYEPPPTAPTGGGTHTCPPCPAPELLGGPSVFLFPPKPKDTLMIS
RTPEVTCVVVDVSHEDPEVKFNWYVDGVEVHNAKTKPREEQYNSTYRVVS
VLTVLHQDWLNGKEYKCKVSNKALPAPIEKTISKAKGQPREPQVYTLPPS
REEMTKNQVSLTCLVKGFYPSDIAVEWESNGQPENNYKTTPPVLDSDGSF
FLYSKLTVDKSRWQQGNVFSCSVMHEALHNHYTQKSLSLSPGK
(SEQ ID NO: 5)

[0653] The ActRIIB-G1Fc protein was expressed in CHO cell lines. Three different leader sequences were considered:
[0654] (i) Honey bee mellitin (HBML): MKFLVNVALVFMVVYISYIYA (SEQ ID NO: 7)
[0655] (ii) Tissue plasminogen activator (TPA): MDAMKRGLCCVLLLCGAVFVSP (SEQ ID NO: 8)
[0656] (iii) Native: MTAPWVALALLWGSLCAG (SEQ ID NO: 9).

[0657] The selected form employs the TPA leader and has the following unprocessed amino acid sequence:

MDAMKRGLCCVLLLCGAVFVSPGASGRGEAETRECIYYNANWELERTNQS
GLERCEGEQDKRLHCYASWRNSSGTIELVKKGCWLDDFNCYDRQECVATE
ENPQVYFCCCEGNFCNERFTHLPEAGGPEVTYEPPPTAPTGGGTHTCPPC
PAPELLGGPSVFLFPPKPKDTLMISRTPEVTCVVVDVSHEDPEVKFNWYV
DGVEVHNAKTKPREEQYNSTYRVVSVLTVLHQDWLNGKEYKCKVSNKA
LPAPIEKTISKAKGQPREPQVYTLPPSREEMTKNQVSLTCLVKGFYPSDI
AVEWESNGQPENNYKTTPPVLDSDGSFFLYSKLTVDKSRWQQGNVFSCSV
MHEALHNHYTQKSLSLSPGK(SEQ ID NO: 6)

[0658] This polypeptide is encoded by the following nucleic acid sequence (SEQ ID NO: 10):

ATGGATGCAAT GAAGAGAGGG CTCTGCTGTG TGCTGCTGCT GTGTGGAGCA GTCTTCGTTT
CGCCCGGCGC CTCTGGGCGT GGGGAGGCTG AGACACGGGA GTGCATCTAC TACAACGCCA
ACTGGGAGCT GGAGCGCACC AACCAGAGCG GCCTGGAGCG CTGCGAAGGC GAGCAGGACA
AGCGGCTGCA CTGCTACGCC TCCTGGCGCA ACAGCTCTGG CACCATCGAG CTCGTGAAGA
AGGGCTGCTG GCTAGATGAC TTCAACTGCT ACGATAGGCA GGAGTGTGTG GCCACTGAGG
AGAACCCCCA GGTGTACTTC TGCTGCTGTG AAGGCAACTT CTGCAACGAG CGCTTCACTC
ATTTGCCAGA GGCTGGGGGC CCGGAAGTCA CGTACGAGCC ACCCCCGACA GCCCCCACCG
GTGGTGGAAC TCACACATGC CCACCGTGCC CAGCACCTGA ACTCCTGGGG GGACCGTCAG
TCTTCCTCTT CCCCCCAAAA CCCAAGGACA CCCTCATGAT CTCCCGGACC CCTGAGGTCA
CATGCGTGGT GGTGGACGTG AGCCACGAAG ACCCTGAGGT CAAGTTCAAC TGGTACGTGG
ACGGCGTGGA GGTGCATAAT GCCAAGACAA AGCCGCGGGA GGAGCAGTAC AACAGCACGT
ACCGTGTGGT CAGCGTCCTC ACCGTCCTGC ACCAGGACTG GCTGAATGGC AAGGAGTACA
AGTGCAAGGT CTCCAACAAA GCCCTCCCAG CCCCCATCGA GAAAACCATC TCCAAAGCCA
AAGGGCAGCC CCGAGAACCA CAGGTGTACA CCCTGCCCCC ATCCCGGGAG GAGATGACCA
AGAACCAGGT CAGCCTGACC TGCCTGGTCA AAGGCTTCTA TCCCAGCGAC ATCGCCGTGG
AGTGGGAGAG CAATGGGCAG CCGGAGAACA ACTACAAGAC CACGCCTCCC GTGCTGGACT
CCGACGGCTC CTTCTTCCTC TATAGCAAGC TCACCGTGGA CAAGAGCAGG TGGCAGCAGG
GGAACGTCTT CTCATGCTCC GTGATGCATG AGGCTCTGCA CAACCACTAC ACGCAGAAGA
GCCTCTCCCT GTCTCCGGGT AAATGA (SEQ ID NO: 10)

[0659] N-terminal sequencing of the CHO-cell produced material revealed a major sequence of -GRGEAE (SEQ ID NO: 11). Notably, other constructs reported in the literature begin with an -SGR... sequence.

[0660] ActRIIB-G1Fc can also be presented as shown below in SEQ ID NO: 519 (with the linker underlined) as purified from CHO cell lines:

GRGEAETRECIYYNANWELERTNQSGLERCEGEQDKRLHCYASWRNSSG
TIELVKKGCWLDDFNCYDRQECVATEENPQVYFCCCEGNFCNERFTHLP
EAGGPEVTYEPPPTAPTGGGTHTCPPCPAPELLGGPSVFLFPPKPKDTL
MISRTPEVTCVVVDVSHEDPEVKFNWYVDGVEVHNAKTKPREEQYNSTY
RVVSVLTVLHQDWLNGKEYKCKVSNKALPVPIEKTISKAKGQPREPQVY
TLPPSREEMTKNQVSLTCLVKGFYPSDIAVEWESNGQPENNYKTTPPVL
DSDGSFFLYSKLTVDKSRWQQGNVFSCSVMHEALHNHYTQKSLSLSPGK
(SEQ ID NO: 519)

[0661] The selected form employs the TPA leader and has the following unprocessed amino acid sequence (SEQ ID NO: 520):

1 MDAMKRGLCC VLLLCGAVFV SPGASGRGEA ETRECIYYNA NWELERTNQS
51 GLERCEGEQD KRLHCYASWR NSSGTIELVK KGCWLDDFNC YDRQECVATE
101 ENPQVYFCCC EGNFCNERFT HLPEAGGPEV TYEPPPTAPT GGGTHTCPPC
151 PAPELLGGPS VFLFPPKPKD TLMISRTPEV TCVVVDVSHE DPEVKFNWYV
201 DGVEVHNAKT KPREEQYNST YRVVSVLTVL HQDWLNGKEY KCKVSNKALP
251 VPIEKTISKA KGQPREPQVY TLPPSREEMT KNQVSLTCLV KGFYPSDIAV
301 EWESNGQPEN NYKTTPPVLD SDGSFFLYSK LTVDKSRWQQ GNVFSCSVMH
351 EALHNHYTQK SLSLSPGK (SEQ ID NO: 520)

[0662] This polypeptide is encoded by the following nucleic acid sequence (SEQ ID NO: 521):

1 ATGGATGCAA TGAAGAGAGG GCTCTGCTGT GTGCTGCTGC TGTGTGGAGC AGTCTTCGTT
61 TCGCCCGGCG CCTCTGGGCG TGGGGAGGCT GAGACACGGG AGTGCATCTA CTACAACGCC
121 AACTGGGAGC TGGAGCGCAC CAACCAGAGC GGCCTGGAGC GCTGCGAAGG CGAGCAGGAC
181 AAGCGGCTGC ACTGCTACGC CTCCTGGCGC AACAGCTCTG GCACCATCGA GCTCGTGAAG
241 AAGGGCTGCT GGCTAGATGA CTTCAACTGC TACGATAGGC AGGAGTGTGT GGCCACTGAG
301 GAGAACCCCC AGGTGTACTT CTGCTGCTGT GAAGGCAACT TCTGCAACGA GCGCTTCACT
361 CATTTGCCAG AGGCTGGGGG CCCGGAAGTC ACGTACGAGC CACCCCCGAC AGCCCCCACC
421 GGTGGTGGAA CTCACACATG CCCACCGTGC CCAGCACCTG AACTCCTGGG GGGACCGTCA
481 GTCTTCCTCT TCCCCCCAAA ACCCAAGGAC ACCCTCATGA TCTCCCGGAC CCCTGAGGTC
541 ACATGCGTGG TGGTGGACGT GAGCCACGAA GACCCTGAGG TCAAGTTCAA CTGGTACGTG
601 GACGGCGTGG AGGTGCATAA TGCCAAGACA AAGCCGCGGG AGGAGCAGTA CAACAGCACG
661 TACCGTGTGG TCAGCGTCCT CACCGTCCTG CACCAGGACT GGCTGAATGG CAAGGAGTAC
721 AAGTGCAAGG TCTCCAACAA AGCCCTCCCA GTCCCCATCG AGAAAACCAT CTCCAAAGCC
781 AAAGGGCAGC CCCGAGAACC ACAGGTGTAC ACCCTGCCCC CATCCCGGGA GGAGATGACC
841 AAGAACCAGG TCAGCCTGAC CTGCCTGGTC AAAGGCTTCT ATCCCAGCGA CATCGCCGTG
901 GAGTGGGAGA GCAATGGGCA GCCGGAGAAC AACTACAAGA CCACGCCTCC CGTGCTGGAC
961 TCCGACGGCT CCTTCTTCCT CTATAGCAAG CTCACCGTGG ACAAGAGCAG GTGGCAGCAG
1021 GGGAACGTCT TCTCATGCTC CGTGATGCAT GAGGCTCTGC ACAACCACTA CACGCAGAAG
1081 AGCCTCTCCC TGTCTCCGGG TAAATGA (SEQ ID NO: 521)

[0663] N-terminal sequencing of the CHO-cell produced material revealed a major sequence of -GRGEAE (SEQ ID NO: 11). Notably, other constructs reported in the literature begin with an -SGR... sequence.

[0664] Purification could be achieved by a series of column chromatography steps, including, for example, three or more of the following, in any order: protein A chromatography, Q sepharose chromatography, phenylsepharose chromatography, size exclusion chromatography, and cation exchange chromatography. The purification could be completed with viral filtration and buffer exchange.

[0665] The ActRIIB-Fc fusion protein was also expressed in HEK293 cells and COS cells. Although material from all cell lines and reasonable culture conditions provided protein with muscle-building activity in vivo, variability in potency was observed perhaps relating to cell line selection and/or culture conditions.

### Example 2: Computational Methods

[0666] The Activin IIB receptor (ActRIIB) binds multiple TGFβ superfamily ligands, including activin A, activin B, GDF8, and GDF11, that stimulate Smad2/3 activation, as well as bone morphogenic proteins (BMPs), such as BMP9 and BMP10, that stimulate Smadl/5/8 activation. ActRIIB-Fc fusion proteins can function as ligand traps that bind to soluble ligands and block Smad activation by preventing ligands from binding to cell surface receptors. ActRIIB-Fc antagonism of BMP9-mediated Smadl/5/8 activation has been known to result in undesired side effects, including epistaxis and telangiectasias (Campbell, C. et al. Muscle Nerve 55: 458-464, 2017). In order to design mutations in ActRIIB that diminish BMP9 binding, while retaining binding to ligands that stimulate Smad2/3 activation, we compared the crystal structures of three ActRIIB ligand complexes: (1) BMP9:ActRIIB:A1k1, PDB ID=4fao, (2) ActRIIB:Activin A, PDB ID:1s4y, and (3) GDF11:ActRIIB:Alk5, PDB ID: 6mac (available from the Protein Data Bank (PDB) https://www.rcsb.org/). Comparison of contacts between ActRIIB and the three ligands based on the crystal structures revealed residues for mutational focus based on charge, polarity, and hydrophobicity differences of the ligand residues contacted by the same corresponding ActRIIB residue. After identifying residues to target for mutation, the Schrodinger Bioluminate biologics modeling software platform (version 2017-4: Bioluminate, Schrodinger, LLC, New York, NY) was used to computationally predict mutations in ActRIIB that would diminish binding to BMP9, while maintaining other ligand-binding activities.

[0667] All residues identified from the comparison of the crystal structures were considered for mutation. Residue Scanning Calculations were performed considering both stability and affinity of the molecules in the structural complex, producing a specified list of potential mutations and energies for each molecule (ligand and receptor) and complex structure, as well as energy differences for both the wild type and the mutant form. After analyzing affinity/stability/prime energy, etc. parameters, the top 5%-10% of the single mutations were identified. This analysis was followed by potential combination of these mutations. Selected single mutations and mutation combinations were structurally analyzed in order to understand structural differences and formed/lost contacts. Ultimately, 817 single mutations were screened for each complex (ActRIIB:ligand), and top hits were selected based on Δaffinity, and also taking into selective consideration Δstability (solvated) and Δprime energy. Other properties were also considered when regarding striking of outliers.

### Example 3: Generation of Variant ActRIIB-Fc Proteins

[0668] Based on the findings described in Example 1, Applicants generated a series of mutations (sequence variations) in the extracellular domain of ActRIIB and produced these variant polypeptides as soluble homodimeric fusion proteins comprising a variant ActRIIB extracellular domain and an Fc domain joined by an optional linker. The background ActRIIB-Fc fusion used for the generation of variant ActRIIB-Fc proteins was ActRIIB-GIFc, and is shown in Example 1 above as SEQ ID NO: 5.

[0669] Various substitution mutations were introduced into the background ActRIIB-G1Fc protein. Based on the data presented in Example 1, it is expected that these constructs, if expressed with a TPA leader, will lack the N-terminal serine. Thus, the majority of mature sequences may begin with a glycine (lacking the N-terminal serine) but some species may be present with the N-terminal serine. Mutations were generated in the ActRIIB extracellular domain by PCR mutagenesis. After PCR, fragments were purified through a Qiagen column, digested with SfoI and AgeI and gel purified. These fragments were ligated into expression vector pAID4 (see WO2006/012627) such that upon ligation it created fusion chimera with human IgG1. Upon transformation into E. coli DH5 alpha, colonies were picked and DNA was isolated. For murine constructs (mFc), a murine IgG2a was substituted for the human IgG1. All mutants were sequence verified.

[0670] The amino acid sequence of unprocessed ActRIIB(F82I-N83R)-G1Fc is shown below (SEQ ID NO: 276). The signal sequence and linker sequence are indicated by solid underline, and the F82I and N83R substitutions are indicated by double underline. The amino acid sequence of SEQ ID NO: 276 may optionally be provided with the lysine removed from the C-terminus.

1 MDAMKRGLCC VLLLCGAVFV SPGASGRGEA ETRECIYYNA NWELERTNQS
51 GLERCEGEQD KRLHCYASWR NSSGTIELVK KGCWLDDIRC YDRQECVATE
101 ENPQVYFCCC EGNFCNERFT HLPEAGGPEV TYEPPPTAPT GGGTHTCPPC
151 PAPELLGGPS VFLFPPKPKD TLMISRTPEV TCVVVDVSHE DPEVKFNWYV
201 DGVEVHNAKT KPREEQYNST YRVVSVLTVL HQDWLNGKEY KCKVSNKALP
251 APIEKTISKA KGQPREPQVY TLPPSREEMT KNQVSLTCLV KGFYPSDIAV
301 EWESNGQPEN NYKTTPPVLD SDGSFFLYSK LTVDKSRWQQ GNVFSCSVMH
351 EALHNHYTQK SLSLSPGK* (SEQ ID NO: 276)

[0671] This ActRIIB(F82I-N83R)-G1Fc fusion polypeptide is encoded by the following nucleic acid sequence (SEQ ID NO: 277):

1 ATGGATGCAA TGAAGAGAGG GCTCTGCTGT GTGCTGCTGC TGTGTGGAGC
51 AGTCTTCGTT TCGCCCGGCG CCTCTGGGCG TGGGGAGGCT GAGACACGGG
101 AGTGCATCTA CTACAACGCC AACTGGGAGC TGGAGCGCAC CAACCAGAGC
151 GGCCTGGAGC GCTGCGAAGG CGAGCAGGAC AAGCGGCTGC ACTGCTACGC
201 CTCCTGGCGC AACAGCTCTG GCACCATCGA GCTCGTGAAG AAGGGCTGCT
251 GGCTAGATGA CATCCGTTGC TACGATAGGC AGGAGTGTGT GGCCACTGAG
301 GAGAACCCCC AGGTGTACTT CTGCTGCTGT GAAGGCAACT TCTGCAACGA
351 GCGCTTCACT CATTTGCCAG AGGCTGGGGG CCCGGAAGTC ACGTACGAGC
401 CACCCCCGAC AGCCCCCACC GGTGGTGGAA CTCACACATG CCCACCGTGC
451 CCAGCACCTG AACTCCTGGG GGGACCGTCA GTCTTCCTCT TCCCCCCAAA
501 ACCCAAGGAC ACCCTCATGA TCTCCCGGAC CCCTGAGGTC ACATGCGTGG
551 TGGTGGACGT GAGCCACGAA GACCCTGAGG TCAAGTTCAA CTGGTACGTG
601 GACGGCGTGG AGGTGCATAA TGCCAAGACA AAGCCGCGGG AGGAGCAGTA
651 CAACAGCACG TACCGTGTGG TCAGCGTCCT CACCGTCCTG CACCAGGACT
701 GGCTGAATGG CAAGGAGTAC AAGTGCAAGG TCTCCAACAA AGCCCTCCCA
751 GCCCCCATCG AGAAAACCAT CTCCAAAGCC AAAGGGCAGC CCCGAGAACC
801 ACAGGTGTAC ACCCTGCCCC CATCCCGGGA GGAGATGACC AAGAACCAGG
851 TCAGCCTGAC CTGCCTGGTC AAAGGCTTCT ATCCCAGCGA CATCGCCGTG
901 GAGTGGGAGA GCAATGGGCA GCCGGAGAAC AACTACAAGA CCACGCCTCC
951 CGTGCTGGAC TCCGACGGCT CCTTCTTCCT CTATAGCAAG CTCACCGTGG
1001 ACAAGAGCAG GTGGCAGCAG GGGAACGTCT TCTCATGCTC CGTGATGCAT
1051 GAGGCTCTGC ACAACCACTA CACGCAGAAG AGCCTCTCCC TGTCTCCGGG
1101 TAAATGA (SEQ ID NO: 277)

[0672] A mature ActRIIB(F82I-N83R)-G1Fc fusion polypeptide (SEQ ID NO: 278) is as follows and may optionally be provided with the lysine removed from the C-terminus.

1 GRGEAETREC IYYNANWELE RTNQSGLERC EGEQDKRLHC YASWRNSSGT
51 IELVKKGCWL DDIRCYDRQE CVATEENPQV YFCCCEGNFC NERFTHLPEA
101 GGPEVTYEPP PTAPTGGGTH TCPPCPAPEL LGGPSVFLFP PKPKDTLMIS
151 RTPEVTCVVV DVSHEDPEVK FNWYVDGVEV HNAKTKPREE QYNSTYRVVS
201 VLTVLHQDWL NGKEYKCKVS NKALPAPIEK TISKAKGQPR EPQVYTLPPS
251 REEMTKNQVS LTCLVKGFYP SDIAVEWESN GQPENNYKTT PPVLDSDGSF
301 FLYSKLTVDK SRWQQGNVFS CSVMHEALHN HYTQKSLSLS PGK*
(SEQ ID NO: 278)

[0673] The amino acid sequence of unprocessed ActRIIB(F82K-N83R)-G1Fc is shown below (SEQ ID NO: 279). The signal sequence and linker sequence are indicated by solid underline, and the F82K and N83R substitutions are indicated by double underline. The amino acid sequence of SEQ ID NO: 279 may optionally be provided with the lysine removed from the C-terminus.

1 MDAMKRGLCC VLLLCGAVFV SPGASGRGEA ETRECIYYNA NWELERTNQS
51 GLERCEGEQD KRLHCYASWR NSSGTIELVK KGCWLDDKRC YDRQECVATE
101 ENPQVYFCCC EGNFCNERFT HLPEAGGPEV TYEPPPTAPT GGGTHTCPPC
151 PAPELLGGPS VFLFPPKPKD TLMISRTPEV TCVVVDVSHE DPEVKFNWYV
201 DGVEVHNAKT KPREEQYNST YRVVSVLTVL HQDWLNGKEY KCKVSNKALP
251 APIEKTISKA KGQPREPQVY TLPPSREEMT KNQVSLTCLV KGFYPSDIAV
301 EWESNGQPEN NYKTTPPVLD SDGSFFLYSK LTVDKSRWQQ GNVFSCSVMH
351 EALHNHYTQK SLSLSPGK* (SEQ ID NO: 279)

[0674] This ActRIIB(F82K-N83R)-G1Fc fusion polypeptide is encoded by the following nucleic acid sequence (SEQ ID NO: 331):

1 ATGGATGCAA TGAAGAGAGG GCTCTGCTGT GTGCTGCTGC TGTGTGGAGC
51 AGTCTTCGTT TCGCCCGGCG CCTCTGGGCG TGGGGAGGCT GAGACACGGG
101 AGTGCATCTA CTACAACGCC AACTGGGAGC TGGAGCGCAC CAACCAGAGC
151 GGCCTGGAGC GCTGCGAAGG CGAGCAGGAC AAGCGGCTGC ACTGCTACGC
201 CTCCTGGCGC AACAGCTCTG GCACCATCGA GCTCGTGAAG AAGGGCTGCT
251 GGCTAGATGA CAAGCGTTGC TACGATAGGC AGGAGTGTGT GGCCACTGAG
301 GAGAACCCCC AGGTGTACTT CTGCTGCTGT GAAGGCAACT TCTGCAACGA
351 GCGCTTCACT CATTTGCCAG AGGCTGGGGG CCCGGAAGTC ACGTACGAGC
401 CACCCCCGAC AGCCCCCACC GGTGGTGGAA CTCACACATG CCCACCGTGC
451 CCAGCACCTG AACTCCTGGG GGGACCGTCA GTCTTCCTCT TCCCCCCAAA
501 ACCCAAGGAC ACCCTCATGA TCTCCCGGAC CCCTGAGGTC ACATGCGTGG
551 TGGTGGACGT GAGCCACGAA GACCCTGAGG TCAAGTTCAA CTGGTACGTG
601 GACGGCGTGG AGGTGCATAA TGCCAAGACA AAGCCGCGGG AGGAGCAGTA
651 CAACAGCACG TACCGTGTGG TCAGCGTCCT CACCGTCCTG CACCAGGACT
701 GGCTGAATGG CAAGGAGTAC AAGTGCAAGG TCTCCAACAA AGCCCTCCCA
751 GCCCCCATCG AGAAAACCAT CTCCAAAGCC AAAGGGCAGC CCCGAGAACC
801 ACAGGTGTAC ACCCTGCCCC CATCCCGGGA GGAGATGACC AAGAACCAGG
851 TCAGCCTGAC CTGCCTGGTC AAAGGCTTCT ATCCCAGCGA CATCGCCGTG
901 GAGTGGGAGA GCAATGGGCA GCCGGAGAAC AACTACAAGA CCACGCCTCC
951 CGTGCTGGAC TCCGACGGCT CCTTCTTCCT CTATAGCAAG CTCACCGTGG
1001 ACAAGAGCAG GTGGCAGCAG GGGAACGTCT TCTCATGCTC CGTGATGCAT
1051 GAGGCTCTGC ACAACCACTA CACGCAGAAG AGCCTCTCCC TGTCTCCGGG
1101 TAAATGA (SEQ ID NO: 331)

[0675] A mature ActRIIB(F82K-N83R)-G1Fc fusion polypeptide (SEQ ID NO: 332) is as follows and may optionally be provided with the lysine removed from the C-terminus.

1 GRGEAETREC IYYNANWELE RTNQSGLERC EGEQDKRLHC YASWRNSSGT
51 IELVKKGCWL DDKRCYDRQE CVATEENPQV YFCCCEGNFC NERFTHLPEA
101 GGPEVTYEPP PTAPTGGGTH TCPPCPAPEL LGGPSVFLFP PKPKDTLMIS
151 RTPEVTCVVV DVSHEDPEVK FNWYVDGVEV HNAKTKPREE QYNSTYRVVS
201 VLTVLHQDWL NGKEYKCKVS NKALPAPIEK TISKAKGQPR EPQVYTLPPS
251 REEMTKNQVS LTCLVKGFYP SDIAVEWESN GQPENNYKTT PPVLDSDGSF
301 FLYSKLTVDK SRWQQGNVFS CSVMHEALHN HYTQKSLSLS PGK*
(SEQ ID NO: 332)

[0676] The amino acid sequence of unprocessed ActRIIB(F82T-N83R)-G1Fc is shown below (SEQ ID NO: 333). The signal sequence and linker sequence are indicated by solid underline, and the F82T and N83R substitutions are indicated by double underline. The amino acid sequence of SEQ ID NO: 333 may optionally be provided with the lysine removed from the C-terminus.

1 MDAMKRGLCC VLLLCGAVFV SPGASGRGEA ETRECIYYNA NWELERTNQS
51 GLERCEGEQD KRLHCYASWR NSSGTIELVK KGCWLDDTRC YDRQECVATE
101 ENPQVYFCCC EGNFCNERFT HLPEAGGPEV TYEPPPTAPT GGGTHTCPPC
151 PAPELLGGPS VFLFPPKPKD TLMISRTPEV TCVVVDVSHE DPEVKFNWYV
201 DGVEVHNAKT KPREEQYNST YRVVSVLTVL HQDWLNGKEY KCKVSNKALP
251 APIEKTISKA KGQPREPQVY TLPPSREEMT KNQVSLTCLV KGFYPSDIAV
301 EWESNGQPEN NYKTTPPVLD SDGSFFLYSK LTVDKSRWQQ GNVFSCSVMH
351 EALHNHYTQK SLSLSPGK* (SEQ ID NO: 333)

[0677] This ActRIIB(F82T-N83R)-G1Fc fusion polypeptide is encoded by the following nucleic acid sequence (SEQ ID NO: 334):

1 ATGGATGCAA TGAAGAGAGG GCTCTGCTGT GTGCTGCTGC TGTGTGGAGC
51 AGTCTTCGTT TCGCCCGGCG CCTCTGGGCG TGGGGAGGCT GAGACACGGG
101 AGTGCATCTA CTACAACGCC AACTGGGAGC TGGAGCGCAC CAACCAGAGC
151 GGCCTGGAGC GCTGCGAAGG CGAGCAGGAC AAGCGGCTGC ACTGCTACGC
201 CTCCTGGCGC AACAGCTCTG GCACCATCGA GCTCGTGAAG AAGGGCTGCT
251 GGCTAGATGA CACCCGTTGC TACGATAGGC AGGAGTGTGT GGCCACTGAG
301 GAGAACCCCC AGGTGTACTT CTGCTGCTGT GAAGGCAACT TCTGCAACGA
351 GCGCTTCACT CATTTGCCAG AGGCTGGGGG CCCGGAAGTC ACGTACGAGC
401 CACCCCCGAC AGCCCCCACC GGTGGTGGAA CTCACACATG CCCACCGTGC
451 CCAGCACCTG AACTCCTGGG GGGACCGTCA GTCTTCCTCT TCCCCCCAAA
501 ACCCAAGGAC ACCCTCATGA TCTCCCGGAC CCCTGAGGTC ACATGCGTGG
551 TGGTGGACGT GAGCCACGAA GACCCTGAGG TCAAGTTCAA CTGGTACGTG
601 GACGGCGTGG AGGTGCATAA TGCCAAGACA AAGCCGCGGG AGGAGCAGTA
651 CAACAGCACG TACCGTGTGG TCAGCGTCCT CACCGTCCTG CACCAGGACT
701 GGCTGAATGG CAAGGAGTAC AAGTGCAAGG TCTCCAACAA AGCCCTCCCA
751 GCCCCCATCG AGAAAACCAT CTCCAAAGCC AAAGGGCAGC CCCGAGAACC
801 ACAGGTGTAC ACCCTGCCCC CATCCCGGGA GGAGATGACC AAGAACCAGG
851 TCAGCCTGAC CTGCCTGGTC AAAGGCTTCT ATCCCAGCGA CATCGCCGTG
901 GAGTGGGAGA GCAATGGGCA GCCGGAGAAC AACTACAAGA CCACGCCTCC
951 CGTGCTGGAC TCCGACGGCT CCTTCTTCCT CTATAGCAAG CTCACCGTGG
1001 ACAAGAGCAG GTGGCAGCAG GGGAACGTCT TCTCATGCTC CGTGATGCAT
1051 GAGGCTCTGC ACAACCACTA CACGCAGAAG AGCCTCTCCC TGTCTCCGGG
1101 TAAATGA (SEQ ID NO: 334)

[0678] A mature ActRIIB(F82T-N83R)-G1Fc fusion polypeptide (SEQ ID NO: 335) is as follows and may optionally be provided with the lysine removed from the C-terminus.

1 GRGEAETREC IYYNANWELE RTNQSGLERC EGEQDKRLHC YASWRNSSGT
51 IELVKKGCWL DDTRCYDRQE CVATEENPQV YFCCCEGNFC NERFTHLPEA
101 GGPEVTYEPP PTAPTGGGTH TCPPCPAPEL LGGPSVFLFP PKPKDTLMIS
151 RTPEVTCVVV DVSHEDPEVK FNWYVDGVEV HNAKTKPREE QYNSTYRVVS
201 VLTVLHQDWL NGKEYKCKVS NKALPAPIEK TISKAKGQPR EPQVYTLPPS
251 REEMTKNQVS LTCLVKGFYP SDIAVEWESN GQPENNYKTT PPVLDSDGSF
301 FLYSKLTVDK SRWQQGNVFS CSVMHEALHN HYTQKSLSLS PGK*
(SEQ ID NO: 335)

[0679] The amino acid sequence of unprocessed ActRIIB(F82T)-G1Fc is shown below (SEQ ID NO: 336). The signal sequence and linker sequence are indicated by solid underline, and the F82T substitution is indicated by double underline. The amino acid sequence of SEQ ID NO: 336 may optionally be provided with the lysine removed from the C-terminus.

1 MDAMKRGLCC VLLLCGAVFV SPGASGRGEA ETRECIYYNA NWELERTNQS
51 GLERCEGEQD KRLHCYASWR NSSGTIELVK KGCWLDDTNC YDRQECVATE
101 ENPQVYFCCC EGNFCNERFT HLPEAGGPEV TYEPPPTAPT GGGTHTCPPC
151 PAPELLGGPS VFLFPPKPKD TLMISRTPEV TCVVVDVSHE DPEVKFNWYV
201 DGVEVHNAKT KPREEQYNST YRVVSVLTVL HQDWLNGKEY KCKVSNKALP
251 APIEKTISKA KGQPREPQVY TLPPSREEMT KNQVSLTCLV KGFYPSDIAV
301 EWESNGQPEN NYKTTPPVLD SDGSFFLYSK LTVDKSRWQQ GNVFSCSVMH
351 EALHNHYTQK SLSLSPGK* (SEQ ID NO: 336)

[0680] This ActRIIB(F82T)-G1Fc fusion polypeptide is encoded by the following nucleic acid sequence (SEQ ID NO: 337):

1 ATGGATGCAA TGAAGAGAGG GCTCTGCTGT GTGCTGCTGC TGTGTGGAGC
51 AGTCTTCGTT TCGCCCGGCG CCTCTGGGCG TGGGGAGGCT GAGACACGGG
101 AGTGCATCTA CTACAACGCC AACTGGGAGC TGGAGCGCAC CAACCAGAGC
151 GGCCTGGAGC GCTGCGAAGG CGAGCAGGAC AAGCGGCTGC ACTGCTACGC
201 CTCCTGGCGC AACAGCTCTG GCACCATCGA GCTCGTGAAG AAGGGCTGCT
251 GGCTAGATGA CACCAACTGC TACGATAGGC AGGAGTGTGT GGCCACTGAG
301 GAGAACCCCC AGGTGTACTT CTGCTGCTGT GAAGGCAACT TCTGCAACGA
351 GCGCTTCACT CATTTGCCAG AGGCTGGGGG CCCGGAAGTC ACGTACGAGC
401 CACCCCCGAC AGCCCCCACC GGTGGTGGAA CTCACACATG CCCACCGTGC
451 CCAGCACCTG AACTCCTGGG GGGACCGTCA GTCTTCCTCT TCCCCCCAAA
501 ACCCAAGGAC ACCCTCATGA TCTCCCGGAC CCCTGAGGTC ACATGCGTGG
551 TGGTGGACGT GAGCCACGAA GACCCTGAGG TCAAGTTCAA CTGGTACGTG
601 GACGGCGTGG AGGTGCATAA TGCCAAGACA AAGCCGCGGG AGGAGCAGTA
651 CAACAGCACG TACCGTGTGG TCAGCGTCCT CACCGTCCTG CACCAGGACT
701 GGCTGAATGG CAAGGAGTAC AAGTGCAAGG TCTCCAACAA AGCCCTCCCA
751 GCCCCCATCG AGAAAACCAT CTCCAAAGCC AAAGGGCAGC CCCGAGAACC
801 ACAGGTGTAC ACCCTGCCCC CATCCCGGGA GGAGATGACC AAGAACCAGG
851 TCAGCCTGAC CTGCCTGGTC AAAGGCTTCT ATCCCAGCGA CATCGCCGTG
901 GAGTGGGAGA GCAATGGGCA GCCGGAGAAC AACTACAAGA CCACGCCTCC
951 CGTGCTGGAC TCCGACGGCT CCTTCTTCCT CTATAGCAAG CTCACCGTGG
1001 ACAAGAGCAG GTGGCAGCAG GGGAACGTCT TCTCATGCTC CGTGATGCAT
1051 GAGGCTCTGC ACAACCACTA CACGCAGAAG AGCCTCTCCC TGTCTCCGGG
1101 TAAATGA (SEQ ID NO: 337)

[0681] A mature ActRIIB(F82T)-G1Fc fusion polypeptide (SEQ ID NO: 338) is as follows and may optionally be provided with the lysine removed from the C-terminus.

1 GRGEAETREC IYYNANWELE RTNQSGLERC EGEQDKRLHC YASWRNSSGT
51 IELVKKGCWL DDTNCYDRQE CVATEENPQV YFCCCEGNFC NERFTHLPEA
101 GGPEVTYEPP PTAPTGGGTH TCPPCPAPEL LGGPSVFLFP PKPKDTLMIS
151 RTPEVTCVVV DVSHEDPEVK FNWYVDGVEV HNAKTKPREE QYNSTYRVVS
201 VLTVLHQDWL NGKEYKCKVS NKALPAPIEK TISKAKGQPR EPQVYTLPPS
251 REEMTKNQVS LTCLVKGFYP SDIAVEWESN GQPENNYKTT PPVLDSDGSF
301 FLYSKLTVDK SRWQQGNVFS CSVMHEALHN HYTQKSLSLS PGK*
(SEQ ID NO: 338)

[0682] The amino acid sequence of unprocessed ActRIIB(L79H-F82I)-GlFc is shown below (SEQ ID NO: 339). The signal sequence and linker sequence are indicated by solid underline, and the L79H and F82I substitutions are indicated by double underline. The amino acid sequence of SEQ ID NO: 339 may optionally be provided with the lysine removed from the C-terminus.

1 MDAMKRGLCC VLLLCGAVFV SPGASGRGEA ETRECIYYNA NWELERTNQS
51 GLERCEGEQD KRLHCYASWR NSSGTIELVK KGCWHDDINC YDRQECVATE
101 ENPQVYFCCC EGNFCNERFT HLPEAGGPEV TYEPPPTAPT GGGTHTCPPC
151 PAPELLGGPS VFLFPPKPKD TLMISRTPEV TCVVVDVSHE DPEVKFNWYV
201 DGVEVHNAKT KPREEQYNST YRVVSVLTVL HQDWLNGKEY KCKVSNKALP
251 APIEKTISKA KGQPREPQVY TLPPSREEMT KNQVSLTCLV KGFYPSDIAV
301 EWESNGQPEN NYKTTPPVLD SDGSFFLYSK LTVDKSRWQQ GNVFSCSVMH
351 EALHNHYTQK SLSLSPGK* (SEQ ID NO: 339)

[0683] This ActRIIB(L79H-F82I)-GlFc fusion polypeptide is encoded by the following nucleic acid sequence (SEQ ID NO: 340):

1 ATGGATGCAA TGAAGAGAGG GCTCTGCTGT GTGCTGCTGC TGTGTGGAGC
51 AGTCTTCGTT TCGCCCGGCG CCTCTGGGCG TGGGGAGGCT GAGACACGGG
101 AGTGCATCTA CTACAACGCC AACTGGGAGC TGGAGCGCAC CAACCAGAGC
151 GGCCTGGAGC GCTGCGAAGG CGAGCAGGAC AAGCGGCTGC ACTGCTACGC
201 CTCCTGGCGC AACAGCTCTG GCACCATCGA GCTCGTGAAG AAGGGCTGCT
251 GGCACGATGA CATCAACTGC TACGATAGGC AGGAGTGTGT GGCCACTGAG
301 GAGAACCCCC AGGTGTACTT CTGCTGCTGT GAAGGCAACT TCTGCAACGA
351 GCGCTTCACT CATTTGCCAG AGGCTGGGGG CCCGGAAGTC ACGTACGAGC
401 CACCCCCGAC AGCCCCCACC GGTGGTGGAA CTCACACATG CCCACCGTGC
451 CCAGCACCTG AACTCCTGGG GGGACCGTCA GTCTTCCTCT TCCCCCCAAA
501 ACCCAAGGAC ACCCTCATGA TCTCCCGGAC CCCTGAGGTC ACATGCGTGG
551 TGGTGGACGT GAGCCACGAA GACCCTGAGG TCAAGTTCAA CTGGTACGTG
601 GACGGCGTGG AGGTGCATAA TGCCAAGACA AAGCCGCGGG AGGAGCAGTA
651 CAACAGCACG TACCGTGTGG TCAGCGTCCT CACCGTCCTG CACCAGGACT
701 GGCTGAATGG CAAGGAGTAC AAGTGCAAGG TCTCCAACAA AGCCCTCCCA
751 GCCCCCATCG AGAAAACCAT CTCCAAAGCC AAAGGGCAGC CCCGAGAACC
801 ACAGGTGTAC ACCCTGCCCC CATCCCGGGA GGAGATGACC AAGAACCAGG
851 TCAGCCTGAC CTGCCTGGTC AAAGGCTTCT ATCCCAGCGA CATCGCCGTG
901 GAGTGGGAGA GCAATGGGCA GCCGGAGAAC AACTACAAGA CCACGCCTCC
951 CGTGCTGGAC TCCGACGGCT CCTTCTTCCT CTATAGCAAG CTCACCGTGG
1001 ACAAGAGCAG GTGGCAGCAG GGGAACGTCT TCTCATGCTC CGTGATGCAT
1051 GAGGCTCTGC ACAACCACTA CACGCAGAAG AGCCTCTCCC TGTCTCCGGG
1101 TAAATGA (SEQ ID NO: 340)

[0684] A mature ActRIIB(L79H-F82I)-GlFc fusion polypeptide (SEQ ID NO: 341) is as follows and may optionally be provided with the lysine removed from the C-terminus.

1 GRGEAETREC IYYNANWELE RTNQSGLERC EGEQDKRLHC YASWRNSSGT
51 IELVKKGCWH DDINCYDRQE CVATEENPQV YFCCCEGNFC NERFTHLPEA
101 GGPEVTYEPP PTAPTGGGTH TCPPCPAPEL LGGPSVFLFP PKPKDTLMIS
151 RTPEVTCVVV DVSHEDPEVK FNWYVDGVEV HNAKTKPREE QYNSTYRVVS
201 VLTVLHQDWL NGKEYKCKVS NKALPAPIEK TISKAKGQPR EPQVYTLPPS
251 REEMTKNQVS LTCLVKGFYP SDIAVEWESN GQPENNYKTT PPVLDSDGSF
301 FLYSKLTVDK SRWQQGNVFS CSVMHEALHN HYTQKSLSLS PGK*
(SEQ ID NO: 341)

[0685] The amino acid sequence of unprocessed ActRIIB(L79H)-GlFc is shown below (SEQ ID NO: 342). The signal sequence and linker sequence are indicated by solid underline, and the L79H substitution is indicated by double underline. The amino acid sequence of SEQ ID NO: 342 may optionally be provided with the lysine removed from the C-terminus.

1 MDAMKRGLCC VLLLCGAVFV SPGASGRGEA ETRECIYYNA NWELERTNQS
51 GLERCEGEQD KRLHCYASWR NSSGTIELVK KGCWHDDFNC YDRQECVATE
101 ENPQVYFCCC EGNFCNERFT HLPEAGGPEV TYEPPPTAPT GGGTHTCPPC
151 PAPELLGGPS VFLFPPKPKD TLMISRTPEV TCVVVDVSHE DPEVKFNWYV
201 DGVEVHNAKT KPREEQYNST YRVVSVLTVL HQDWLNGKEY KCKVSNKALP
251 APIEKTISKA KGQPREPQVY TLPPSREEMT KNQVSLTCLV KGFYPSDIAV
301 EWESNGQPEN NYKTTPPVLD SDGSFFLYSK LTVDKSRWQQ GNVFSCSVMH
351 EALHNHYTQK SLSLSPGK* (SEQ ID NO: 342)

[0686] This ActRIIB(L79H)-GlFc fusion polypeptide is encoded by the following nucleic acid sequence (SEQ ID NO: 343):

1 ATGGATGCAA TGAAGAGAGG GCTCTGCTGT GTGCTGCTGC TGTGTGGAGC
51 AGTCTTCGTT TCGCCCGGCG CCTCTGGGCG TGGGGAGGCT GAGACACGGG
101 AGTGCATCTA CTACAACGCC AACTGGGAGC TGGAGCGCAC CAACCAGAGC
151 GGCCTGGAGC GCTGCGAAGG CGAGCAGGAC AAGCGGCTGC ACTGCTACGC
201 CTCCTGGCGC AACAGCTCTG GCACCATCGA GCTCGTGAAG AAGGGCTGCT
251 GGCACGATGA CTTCAACTGC TACGATAGGC AGGAGTGTGT GGCCACTGAG
301 GAGAACCCCC AGGTGTACTT CTGCTGCTGT GAAGGCAACT TCTGCAACGA
351 GCGCTTCACT CATTTGCCAG AGGCTGGGGG CCCGGAAGTC ACGTACGAGC
401 CACCCCCGAC AGCCCCCACC GGTGGTGGAA CTCACACATG CCCACCGTGC
451 CCAGCACCTG AACTCCTGGG GGGACCGTCA GTCTTCCTCT TCCCCCCAAA
501 ACCCAAGGAC ACCCTCATGA TCTCCCGGAC CCCTGAGGTC ACATGCGTGG
551 TGGTGGACGT GAGCCACGAA GACCCTGAGG TCAAGTTCAA CTGGTACGTG
601 GACGGCGTGG AGGTGCATAA TGCCAAGACA AAGCCGCGGG AGGAGCAGTA
651 CAACAGCACG TACCGTGTGG TCAGCGTCCT CACCGTCCTG CACCAGGACT
701 GGCTGAATGG CAAGGAGTAC AAGTGCAAGG TCTCCAACAA AGCCCTCCCA
751 GCCCCCATCG AGAAAACCAT CTCCAAAGCC AAAGGGCAGC CCCGAGAACC
801 ACAGGTGTAC ACCCTGCCCC CATCCCGGGA GGAGATGACC AAGAACCAGG
851 TCAGCCTGAC CTGCCTGGTC AAAGGCTTCT ATCCCAGCGA CATCGCCGTG
901 GAGTGGGAGA GCAATGGGCA GCCGGAGAAC AACTACAAGA CCACGCCTCC
951 CGTGCTGGAC TCCGACGGCT CCTTCTTCCT CTATAGCAAG CTCACCGTGG
1001 ACAAGAGCAG GTGGCAGCAG GGGAACGTCT TCTCATGCTC CGTGATGCAT
1051 GAGGCTCTGC ACAACCACTA CACGCAGAAG AGCCTCTCCC TGTCTCCGGG
1101 TAAATGA (SEQ ID NO: 343)

[0687] A mature ActRIIB(L79H)-GlFc fusion polypeptide (SEQ ID NO: 344) is as follows and may optionally be provided with the lysine removed from the C-terminus.

1 GRGEAETREC IYYNANWELE RTNQSGLERC EGEQDKRLHC YASWRNSSGT
51 IELVKKGCWH DDFNCYDRQE CVATEENPQV YFCCCEGNFC NERFTHLPEA
101 GGPEVTYEPP PTAPTGGGTH TCPPCPAPEL LGGPSVFLFP PKPKDTLMIS
151 RTPEVTCVVV DVSHEDPEVK FNWYVDGVEV HNAKTKPREE QYNSTYRVVS
201 VLTVLHQDWL NGKEYKCKVS NKALPAPIEK TISKAKGQPR EPQVYTLPPS
251 REEMTKNQVS LTCLVKGFYP SDIAVEWESN GQPENNYKTT PPVLDSDGSF
301 FLYSKLTVDK SRWQQGNVFS CSVMHEALHN HYTQKSLSLS PGK*
(SEQ ID NO: 344)

[0688] The amino acid sequence of unprocessed ActRIIB(L79H-F82K)-GlFc is shown below (SEQ ID NO: 345). The signal sequence and linker sequence are indicated by solid underline, and the L79H and F82K substitutions are indicated by double underline. The amino acid sequence of SEQ ID NO: 345 may optionally be provided with the lysine removed from the C-terminus.

1 MDAMKRGLCC VLLLCGAVFV SPGASGRGEA ETRECIYYNA NWELERTNQS
51 GLERCEGEQD KRLHCYASWR NSSGTIELVK KGCWHDDKNC YDRQECVATE
101 ENPQVYFCCC EGNFCNERFT HLPEAGGPEV TYEPPPTAPT GGGTHTCPPC
151 PAPELLGGPS VFLFPPKPKD TLMISRTPEV TCVVVDVSHE DPEVKFNWYV
201 DGVEVHNAKT KPREEQYNST YRVVSVLTVL HQDWLNGKEY KCKVSNKALP
251 APIEKTISKA KGQPREPQVY TLPPSREEMT KNQVSLTCLV KGFYPSDIAV
301 EWESNGQPEN NYKTTPPVLD SDGSFFLYSK LTVDKSRWQQ GNVFSCSVMH
351 EALHNHYTQK SLSLSPGK* (SEQ ID NO: 345)

[0689] This ActRIIB(L79H-F82K)-GlFc fusion polypeptide is encoded by the following nucleic acid sequence (SEQ ID NO: 346):

1 ATGGATGCAA TGAAGAGAGG GCTCTGCTGT GTGCTGCTGC TGTGTGGAGC
51 AGTCTTCGTT TCGCCCGGCG CCTCTGGGCG TGGGGAGGCT GAGACACGGG
101 AGTGCATCTA CTACAACGCC AACTGGGAGC TGGAGCGCAC CAACCAGAGC
151 GGCCTGGAGC GCTGCGAAGG CGAGCAGGAC AAGCGGCTGC ACTGCTACGC
201 CTCCTGGCGC AACAGCTCTG GCACCATCGA GCTCGTGAAG AAGGGCTGCT
251 GGCACGATGA CAAGAACTGC TACGATAGGC AGGAGTGTGT GGCCACTGAG
301 GAGAACCCCC AGGTGTACTT CTGCTGCTGT GAAGGCAACT TCTGCAACGA
351 GCGCTTCACT CATTTGCCAG AGGCTGGGGG CCCGGAAGTC ACGTACGAGC
401 CACCCCCGAC AGCCCCCACC GGTGGTGGAA CTCACACATG CCCACCGTGC
451 CCAGCACCTG AACTCCTGGG GGGACCGTCA GTCTTCCTCT TCCCCCCAAA
501 ACCCAAGGAC ACCCTCATGA TCTCCCGGAC CCCTGAGGTC ACATGCGTGG
551 TGGTGGACGT GAGCCACGAA GACCCTGAGG TCAAGTTCAA CTGGTACGTG
601 GACGGCGTGG AGGTGCATAA TGCCAAGACA AAGCCGCGGG AGGAGCAGTA
651 CAACAGCACG TACCGTGTGG TCAGCGTCCT CACCGTCCTG CACCAGGACT
701 GGCTGAATGG CAAGGAGTAC AAGTGCAAGG TCTCCAACAA AGCCCTCCCA
751 GCCCCCATCG AGAAAACCAT CTCCAAAGCC AAAGGGCAGC CCCGAGAACC
801 ACAGGTGTAC ACCCTGCCCC CATCCCGGGA GGAGATGACC AAGAACCAGG
851 TCAGCCTGAC CTGCCTGGTC AAAGGCTTCT ATCCCAGCGA CATCGCCGTG
901 GAGTGGGAGA GCAATGGGCA GCCGGAGAAC AACTACAAGA CCACGCCTCC
951 CGTGCTGGAC TCCGACGGCT CCTTCTTCCT CTATAGCAAG CTCACCGTGG
1001 ACAAGAGCAG GTGGCAGCAG GGGAACGTCT TCTCATGCTC CGTGATGCAT
1051 GAGGCTCTGC ACAACCACTA CACGCAGAAG AGCCTCTCCC TGTCTCCGGG
1101 TAAATGA (SEQ ID NO: 346)

[0690] A mature ActRIIB(L79H-F82K)-GlFc fusion polypeptide (SEQ ID NO: 347) is as follows and may optionally be provided with the lysine removed from the C-terminus.

1 GRGEAETREC IYYNANWELE RTNQSGLERC EGEQDKRLHC YASWRNSSGT
51 IELVKKGCWH DDKNCYDRQE CVATEENPQV YFCCCEGNFC NERFTHLPEA
101 GGPEVTYEPP PTAPTGGGTH TCPPCPAPEL LGGPSVFLFP PKPKDTLMIS
151 RTPEVTCVVV DVSHEDPEVK FNWYVDGVEV HNAKTKPREE QYNSTYRVVS
201 VLTVLHQDWL NGKEYKCKVS NKALPAPIEK TISKAKGQPR EPQVYTLPPS
251 REEMTKNQVS LTCLVKGFYP SDIAVEWESN GQPENNYKTT PPVLDSDGSF
301 FLYSKLTVDK SRWQQGNVFS CSVMHEALHN HYTQKSLSLS PGK*
(SEQ ID NO: 347)

[0691] The amino acid sequence of unprocessed ActRIIB(E50L)-GlFc is shown below (SEQ ID NO: 348). The signal sequence and linker sequence are indicated by solid underline, and the E50L substitution is indicated by double underline. The amino acid sequence of SEQ ID NO: 348 may optionally be provided with the lysine removed from the C-terminus.

1 MDAMKRGLCC VLLLCGAVFV SPGASGRGEA ETRECIYYNA NWELERTNQS
51 GLERCLGEQD KRLHCYASWR NSSGTIELVK KGCWLDDFNC YDRQECVATE
101 ENPQVYFCCC EGNFCNERFT HLPEAGGPEV TYEPPPTAPT GGGTHTCPPC
151 PAPELLGGPS VFLFPPKPKD TLMISRTPEV TCVVVDVSHE DPEVKFNWYV
201 DGVEVHNAKT KPREEQYNST YRVVSVLTVL HQDWLNGKEY KCKVSNKALP
251 APIEKTISKA KGQPREPQVY TLPPSREEMT KNQVSLTCLV KGFYPSDIAV
301 EWESNGQPEN NYKTTPPVLD SDGSFFLYSK LTVDKSRWQQ GNVFSCSVMH
351 EALHNHYTQK SLSLSPGK* (SEQ ID NO: 348)

[0692] This ActRIIB(E50L)-GlFc fusion polypeptide is encoded by the following nucleic acid sequence (codon optimized) (SEQ ID NO: 349):

1 ATGGATGCGA TGAAACGCGG CCTGTGCTGC GTGCTGCTGC TGTGCGGCGC
51 GGTGTTTGTG AGCCCGGGCG CCAGCGGCCG CGGCGAAGCG GAAACCCGCG
101 AATGCATTTA TTATAACGCG AACTGGGAAC TGGAACGCAC CAACCAGAGC
151 GGCCTGGAAC GCTGCCTGGG CGAACAGGAT AAACGCCTGC ATTGCTATGC
201 GAGCTGGCGC AACAGCAGCG GCACCATTGA ACTGGTGAAA AAAGGCTGCT
251 GGCTGGATGA TTTTAACTGC TATGATCGCC AGGAATGCGT GGCGACCGAA
301 GAAAACCCGC AGGTGTATTT TTGCTGCTGC GAAGGCAACT TTTGCAACGA
351 ACGCTTTACC CATCTGCCGG AAGCGGGCGG CCCGGAAGTG ACCTATGAAC
401 CGCCGCCGAC CGCGCCGACC GGTGGTGGAA CTCACACATG CCCACCGTGC
451 CCAGCACCTG AACTCCTGGG GGGACCGTCA GTCTTCCTCT TCCCCCCAAA
501 ACCCAAGGAC ACCCTCATGA TCTCCCGGAC CCCTGAGGTC ACATGCGTGG
551 TGGTGGACGT GAGCCACGAA GACCCTGAGG TCAAGTTCAA CTGGTACGTG
601 GACGGCGTGG AGGTGCATAA TGCCAAGACA AAGCCGCGGG AGGAGCAGTA
651 CAACAGCACG TACCGTGTGG TCAGCGTCCT CACCGTCCTG CACCAGGACT
701 GGCTGAATGG CAAGGAGTAC AAGTGCAAGG TCTCCAACAA AGCCCTCCCA
751 GCCCCCATCG AGAAAACCAT CTCCAAAGCC AAAGGGCAGC CCCGAGAACC
801 ACAGGTGTAC ACCCTGCCCC CATCCCGGGA GGAGATGACC AAGAACCAGG
851 TCAGCCTGAC CTGCCTGGTC AAAGGCTTCT ATCCCAGCGA CATCGCCGTG
901 GAGTGGGAGA GCAATGGGCA GCCGGAGAAC AACTACAAGA CCACGCCTCC
951 CGTGCTGGAC TCCGACGGCT CCTTCTTCCT CTATAGCAAG CTCACCGTGG
1001 ACAAGAGCAG GTGGCAGCAG GGGAACGTCT TCTCATGCTC CGTGATGCAT
1051 GAGGCTCTGC ACAACCACTA CACGCAGAAG AGCCTCTCCC TGTCTCCGGG
1101 TAAATGA (SEQ ID NO: 349)

[0693] A mature ActRIIB(E50L)-GlFc fusion polypeptide (SEQ ID NO: 350) is as follows and may optionally be provided with the lysine removed from the C-terminus.

1 GRGEAETREC IYYNANWELE RTNQSGLERC LGEQDKRLHC YASWRNSSGT
51 IELVKKGCWL DDFNCYDRQE CVATEENPQV YFCCCEGNFC NERFTHLPEA
101 GGPEVTYEPP PTAPTGGGTH TCPPCPAPEL LGGPSVFLFP PKPKDTLMIS
151 RTPEVTCVVV DVSHEDPEVK FNWYVDGVEV HNAKTKPREE QYNSTYRVVS
201 VLTVLHQDWL NGKEYKCKVS NKALPAPIEK TISKAKGQPR EPQVYTLPPS
251 REEMTKNQVS LTCLVKGFYP SDIAVEWESN GQPENNYKTT PPVLDSDGSF
301 FLYSKLTVDK SRWQQGNVFS CSVMHEALHN HYTQKSLSLS PGK*
(SEQ ID NO: 350)

[0694] The amino acid sequence of unprocessed ActRIIB(L38N-L79R)-GlFc is shown below (SEQ ID NO: 351). The signal sequence and linker sequence are indicated by solid underline, and the L38N and L79R substitutions are indicated by double underline. The amino acid sequence of SEQ ID NO: 351 may optionally be provided with the lysine removed from the C-terminus.

1 MDAMKRGLCC VLLLCGAVFV SPGASGRGEA ETRECIYYNA NWENERTNQS
51 GLERCEGEQD KRLHCYASWR NSSGTIELVK KGCWRDDFNC YDRQECVATE
101 ENPQVYFCCC EGNFCNERFT HLPEAGGPEV TYEPPPTAPT GGGTHTCPPC
151 PAPELLGGPS VFLFPPKPKD TLMISRTPEV TCVVVDVSHE DPEVKFNWYV
201 DGVEVHNAKT KPREEQYNST YRVVSVLTVL HQDWLNGKEY KCKVSNKALP
251 APIEKTISKA KGQPREPQVY TLPPSREEMT KNQVSLTCLV KGFYPSDIAV
301 EWESNGQPEN NYKTTPPVLD SDGSFFLYSK LTVDKSRWQQ GNVFSCSVMH
351 EALHNHYTQK SLSLSPGK* (SEQ ID NO: 351)

[0695] This ActRIIB(L38N-L79R)-GlFc fusion polypeptide is encoded by the following nucleic acid sequence (SEQ ID NO: 352):

1 ATGGATGCAA TGAAGAGAGG GCTCTGCTGT GTGCTGCTGC TGTGTGGAGC
51 AGTCTTCGTT TCGCCCGGCG CCTCTGGGCG TGGGGAGGCT GAGACACGGG
101 AGTGCATCTA CTACAACGCC AACTGGGAGA ACGAGCGCAC CAACCAGAGC
151 GGCCTGGAGC GCTGCGAAGG CGAGCAGGAC AAGCGGCTGC ACTGCTACGC
201 CTCCTGGCGC AACAGCTCTG GCACCATCGA GCTCGTGAAG AAGGGCTGCT
251 GGCGCGATGA CTTCAACTGC TACGATAGGC AGGAGTGTGT GGCCACTGAG
301 GAGAACCCCC AGGTGTACTT CTGCTGCTGT GAAGGCAACT TCTGCAACGA
351 GCGCTTCACT CATTTGCCAG AGGCTGGGGG CCCGGAAGTC ACGTACGAGC
401 CACCCCCGAC AGCCCCCACC GGTGGTGGAA CTCACACATG CCCACCGTGC
451 CCAGCACCTG AACTCCTGGG GGGACCGTCA GTCTTCCTCT TCCCCCCAAA
501 ACCCAAGGAC ACCCTCATGA TCTCCCGGAC CCCTGAGGTC ACATGCGTGG
551 TGGTGGACGT GAGCCACGAA GACCCTGAGG TCAAGTTCAA CTGGTACGTG
601 GACGGCGTGG AGGTGCATAA TGCCAAGACA AAGCCGCGGG AGGAGCAGTA
651 CAACAGCACG TACCGTGTGG TCAGCGTCCT CACCGTCCTG CACCAGGACT
701 GGCTGAATGG CAAGGAGTAC AAGTGCAAGG TCTCCAACAA AGCCCTCCCA
751 GCCCCCATCG AGAAAACCAT CTCCAAAGCC AAAGGGCAGC CCCGAGAACC
801 ACAGGTGTAC ACCCTGCCCC CATCCCGGGA GGAGATGACC AAGAACCAGG
851 TCAGCCTGAC CTGCCTGGTC AAAGGCTTCT ATCCCAGCGA CATCGCCGTG
901 GAGTGGGAGA GCAATGGGCA GCCGGAGAAC AACTACAAGA CCACGCCTCC
951 CGTGCTGGAC TCCGACGGCT CCTTCTTCCT CTATAGCAAG CTCACCGTGG
1001 ACAAGAGCAG GTGGCAGCAG GGGAACGTCT TCTCATGCTC CGTGATGCAT
1051 GAGGCTCTGC ACAACCACTA CACGCAGAAG AGCCTCTCCC TGTCTCCGGG
1101 TAAATGA (SEQ ID NO: 352)

[0696] A mature ActRIIB(L38N-L79R)-GlFc fusion polypeptide (SEQ ID NO: 353) is as follows and may optionally be provided with the lysine removed from the C-terminus.

1 GRGEAETREC IYYNANWENE RTNQSGLERC EGEQDKRLHC YASWRNSSGT
51 IELVKKGCWR DDFNCYDRQE CVATEENPQV YFCCCEGNFC NERFTHLPEA
101 GGPEVTYEPP PTAPTGGGTH TCPPCPAPEL LGGPSVFLFP PKPKDTLMIS
151 RTPEVTCVVV DVSHEDPEVK FNWYVDGVEV HNAKTKPREE QYNSTYRVVS
201 VLTVLHQDWL NGKEYKCKVS NKALPAPIEK TISKAKGQPR EPQVYTLPPS
251 REEMTKNQVS LTCLVKGFYP SDIAVEWESN GQPENNYKTT PPVLDSDGSF
301 FLYSKLTVDK SRWQQGNVFS CSVMHEALHN HYTQKSLSLS PGK*
(SEQ ID NO: 353)

[0697] The amino acid sequence of unprocessed ActRIIB(V99G)-GlFc is shown below (SEQ ID NO: 354). The signal sequence and linker sequence are indicated by solid underline, and the V99G substitution is indicated by double underline. The amino acid sequence of SEQ ID NO: 354 may optionally be provided with the lysine removed from the C-terminus.

1 MDAMKRGLCC VLLLCGAVFV SPGASGRGEA ETRECIYYNA NWELERTNQS
51 GLERCEGEQD KRLHCYASWR NSSGTIELVK KGCWLDDFNC YDRQECVATE
101 ENPQGYFCCC EGNFCNERFT HLPEAGGPEV TYEPPPTAPT GGGTHTCPPC
151 PAPELLGGPS VFLFPPKPKD TLMISRTPEV TCVVVDVSHE DPEVKFNWYV
201 DGVEVHNAKT KPREEQYNST YRVVSVLTVL HQDWLNGKEY KCKVSNKALP
251 APIEKTISKA KGQPREPQVY TLPPSREEMT KNQVSLTCLV KGFYPSDIAV
301 EWESNGQPEN NYKTTPPVLD SDGSFFLYSK LTVDKSRWQQ GNVFSCSVMH
351 EALHNHYTQK SLSLSPGK* (SEQ ID NO: 354)

[0698] This ActRIIB(V99G)-GlFc fusion polypeptide is encoded by the following nucleic acid sequence (codon optimized) (SEQ ID NO: 355):

1 ATGGATGCGA TGAAACGCGG CCTGTGCTGC GTGCTGCTGC TGTGCGGCGC
51 GGTGTTTGTG AGCCCGGGCG CCAGCGGCCG CGGCGAAGCG GAAACCCGCG
101 AATGCATTTA TTATAACGCG AACTGGGAAC TGGAACGCAC CAACCAGAGC
151 GGCCTGGAAC GCTGCGAAGG CGAACAGGAT AAACGCCTGC ATTGCTATGC
201 GAGCTGGCGC AACAGCAGCG GCACCATTGA ACTGGTGAAA AAAGGCTGCT
251 GGCTGGATGA TTTTAACTGC TATGATCGCC AGGAATGCGT GGCGACCGAA
301 GAAAACCCGC AGGGCTATTT TTGCTGCTGC GAAGGCAACT TTTGCAACGA
351 ACGCTTTACC CATCTGCCGG AAGCGGGCGG CCCGGAAGTG ACCTATGAAC
401 CGCCGCCGAC CGCGCCGACC GGTGGTGGAA CTCACACATG CCCACCGTGC
451 CCAGCACCTG AACTCCTGGG GGGACCGTCA GTCTTCCTCT TCCCCCCAAA
501 ACCCAAGGAC ACCCTCATGA TCTCCCGGAC CCCTGAGGTC ACATGCGTGG
551 TGGTGGACGT GAGCCACGAA GACCCTGAGG TCAAGTTCAA CTGGTACGTG
601 GACGGCGTGG AGGTGCATAA TGCCAAGACA AAGCCGCGGG AGGAGCAGTA
651 CAACAGCACG TACCGTGTGG TCAGCGTCCT CACCGTCCTG CACCAGGACT
701 GGCTGAATGG CAAGGAGTAC AAGTGCAAGG TCTCCAACAA AGCCCTCCCA
751 GCCCCCATCG AGAAAACCAT CTCCAAAGCC AAAGGGCAGC CCCGAGAACC
801 ACAGGTGTAC ACCCTGCCCC CATCCCGGGA GGAGATGACC AAGAACCAGG
851 TCAGCCTGAC CTGCCTGGTC AAAGGCTTCT ATCCCAGCGA CATCGCCGTG
901 GAGTGGGAGA GCAATGGGCA GCCGGAGAAC AACTACAAGA CCACGCCTCC
951 CGTGCTGGAC TCCGACGGCT CCTTCTTCCT CTATAGCAAG CTCACCGTGG
1001 ACAAGAGCAG GTGGCAGCAG GGGAACGTCT TCTCATGCTC CGTGATGCAT
1051 GAGGCTCTGC ACAACCACTA CACGCAGAAG AGCCTCTCCC TGTCTCCGGG
1101 TAAATGA (SEQ ID NO: 355)

[0699] A mature ActRIIB(V99G)-GlFc fusion polypeptide (SEQ ID NO: 356) is as follows and may optionally be provided with the lysine removed from the C-terminus.

1 GRGEAETREC IYYNANWELE RTNQSGLERC EGEQDKRLHC YASWRNSSGT
51 IELVKKGCWL DDFNCYDRQE CVATEENPQG YFCCCEGNFC NERFTHLPEA
101 GGPEVTYEPP PTAPTGGGTH TCPPCPAPEL LGGPSVFLFP PKPKDTLMIS
151 RTPEVTCVVV DVSHEDPEVK FNWYVDGVEV HNAKTKPREE QYNSTYRVVS
201 VLTVLHQDWL NGKEYKCKVS NKALPAPIEK TISKAKGQPR EPQVYTLPPS
251 REEMTKNQVS LTCLVKGFYP SDIAVEWESN GQPENNYKTT PPVLDSDGSF
301 FLYSKLTVDK SRWQQGNVFS CSVMHEALHN HYTQKSLSLS PGK*
(SEQ ID NO: 356)

[0700] Constructs were expressed in COS or CHO cells by transient infection and purified by filtration and protein A chromatography. In some instances, assays were performed with conditioned medium rather than purified proteins. Purity of samples for reporter gene assays was evaluated by SDS-PAGE and analytical size exclusion chromatography.

[0701] Mutants were tested in binding assays and/or bioassays described below.

[0702] Alternatively, similar mutations could be introduced into an ActRIIB extracellular domain possessing an N-terminal truncation of five amino acids and a C-terminal truncation of three amino acids as shown below (SEQ ID NO: 357). This truncated ActRIIB extracellular domain is denoted ActRIIB(25-131) based on numbering in SEQ ID NO: 2.

25 ETRECIYYNA NWELERTNQS GLERCEGEQD KRLHCYASWR NSSGTIELVK
75 KGCWLDDFNC YDRQECVATE ENPQVYFCCC EGNFCNERFT HLPEAGGPEV
125 TYEPPPT (SEQ ID NO: 53)

[0703] The corresponding background fusion polypeptide, ActRIIB(25-131)-GlFc, is shown below (SEQ ID NO: 12).

1 ETRECIYYNA NWELERTNQS GLERCEGEQD KRLHCYASWR NSSGTIELVK
51 KGCWLDDFNC YDRQECVATE ENPQVYFCCC EGNFCNERFT HLPEAGGPEV
101 TYEPPPTGGG THTCPPCPAP ELLGGPSVFL FPPKPKDTLM ISRTPEVTCV
151 VVDVSHEDPE VKFNWYVDGV EVHNAKTKPR EEQYNSTYRV VSVLTVLHQD
201 WLNGKEYKCK VSNKALPAPI EKTISKAKGQ PREPQVYTLP PSREEMTKNQ
251 VSLTCLVKGF YPSDIAVEWE SNGQPENNYK TTPPVLDSDG SFFLYSKLTV
301 DKSRWQQGNV FSCSVMHEAL HNHYTQKSLS LSPGK (SEQ ID NO: 12)

### Example 4. Activity and Ligand Binding Profiles of Variant ActRIIB-Fc Proteins

[0704] To determine ligand binding profiles of variant ActRIIB-Fc homodimers, a Biacore™-based binding assay was used to compare ligand binding kinetics of certain variant ActRIIB-Fc proteins. ActRIIB-Fc proteins to be tested were independently captured onto the system using an anti-Fc antibody. Ligands were then injected and allowed to flow over the captured receptor protein. Results of variant ActRIIB-Fc proteins analyzed at 37° C. are shown in FIGS. 8A and 8B. ActRIIB-G1Fc was used as the control protein.

[0705] To determine activity of variant ActRIIB-Fc proteins, an A204 cell-based assay was used to compare effects among variant ActRIIB-Fc proteins on signaling by activin A, activin B, GDF8, GDF11, BMP9, and BMP10, in comparison to ActRIIB-G1Fc. In brief, this assay uses a human A204 rhabdomyosarcoma cell line (ATCC®: HTB-82™) derived from muscle and the reporter vector pGL3(CAGA)12 (Dennler et al., 1998, EMBO 17: 3091-3100) as well as a Renilla reporter plasmid (pRLCMV) to control for transfection efficiency. The CAGA12 motif is present in TGF-β responsive genes (e.g., PAI-1 gene), so this vector is of general use for ligands that can signal through Smad2/3, including activin A, GDF11, and BMP9.

[0706] On day 1, A204 cells were transferred into one or more 48-well plates. On day 2, these cells were transfected with 10 µg pGL3(CAGA)12 or pGL3(CAGA)12(10 µg) + pRLCMV (1 µg) and Fugene. On day 3, ligands diluted in medium containing 0.1% BSA were preincubated with ActRIIB-Fc proteins for 1 hr before addition to cells. Approximately six hour later, the cells were rinsed with PBS and lysed. Cell lysates were analyzed in a luciferase assay to determine the extent of Smad activation.

[0707] This assay was used to screen variant ActRIIB-Fc proteins for inhibitory effects on cell signaling by activin A, activin B, GDF8, GDF11, BMP9, and BMP10. Potencies of homodimeric Fc fusion proteins incorporating amino acid substitutions in the human ActRIIB extracellular domain were compared with that of an Fc fusion protein comprising unmodified human ActRIIB extracellular domain, ActRIIB-G1Fc. For some variants tested, it was not possible to calculate an accurate IC₅₀, but signs of inhibition in the slope of the curves were detectable. For these variants, an estimate was included of the order of magnitude of the relative IC50, i.e. >10 nM or > 100 nM instead of a definite number. Such data points are indicated by a (*) in Table 1 below. For some variants tested, there was no detectable inhibition in the slope of the curves over the concentration range tested, which is indicated by “ND” in Table 1.

TABLE 1

Inhibitory Potency of Homodimeric ActRIIB-Fc Constructs
Inhibitory Potency of Homodimeric ActRIIB-Fc Constructs

| ActRIIB protein | IC₅₀ (nM) | | | | | |
|---|---|---|---|---|---|---|
| | GDF8 | GDF11 | Activin A | Activin B | BMP9 | BMP10 |
| ActRIIB-GIFc | 0.95 | 0.12 | 0.05 | 0.067 | 1.82 | 0.036 |
| F82I-N83R | ND | 9.95 | 1.67 | 0.08 | ND | 13.25 |
| F82K-N83R | ND | ND | 1.32 | 0.09 | ND | 0.53 |
| F82T-N83R | ND | 17.94 | 1.52 | 0.11 | ND | 12.57 |
| F82T | 2.17 | 0.27 | 0.10 | 0.09 | ND | 0.07 |
| L79H-F82I | >10* | 0.36 | >100* | 0.15 | ND | >100* |
| L79H | 5.76 | 0.24 | >10* | 0.07 | ND | >100* |
| L79H-F82K | ND | >100* | ND | 0.10 | ND | >100* |

ND: not detectable over concentration range tested * estimate of the order of magnitude of the IC₅₀

[0708] As shown in Table 1 above as well as in FIGS. 8A and 8B, amino acid substitutions in the ActRIIB extracellular domain can alter the balance between ActRIIB:ligand binding and downstream signaling activities in various in vitro assay. In general, applicant achieved the goal of generating variants in the ActRIIB extracellular domain that exhibited decreased or non-detectable binding to BMP9, compared to a fusion protein containing unmodified ActRIIB extracellular domain (ActRIIB-GlFc), while retaining other ligand binding properties.

[0709] Additionally, variants ActRIIB (L79H-F82I), ActRIIB (L79H), and ActRIIB (L79H-F82K), while demonstrating a decrease in binding to BMP9, also exhibited a significant decrease in in activin A binding while retaining relatively high affinity for activin B, as compared to ActRIIB-G1Fc. IC₅₀ values showing inhibitory potency in Table 1 are consistent with this ligand binding trend. Similarly, variants ActRIIB (F82K-N83R), ActRIIB (F82I-N83R), and ActRIIB (F82T-N83R) demonstrate a similar trend.

[0710] Furthermore, variants ActRIIB (F82K-N83R), ActRIIB (F82I-N83R), ActRIIB (F82T-N83R), and ActRIIB (L79H-F82K), while demonstrating a decrease in binding to BMP9 and retaining relatively high affinity for activin B, also exhibited a significant decrease in GDF8 and GDF11 binding, as compared to ActRIIB-G1Fc. IC₅₀ values showing inhibitory potency in Table 1 are consistent with this ligand binding trend.

[0711] It was further noted that, variants ActRIIB (L79H-F82I), ActRIIB (L79H), and ActRIIB (L79H-F82K), while demonstrating a decrease in binding to BMP9 and retaining relatively high affinity for activin B, also exhibited a decrease in BMP10 binding as compared to ActRIIB-G1Fc. IC₅₀ values showing inhibitory potency in Table 1 are consistent with this ligand binding trend.

[0712] Therefore, in addition to achieving the goal of producing ActRIIB variants that exhibit reduced to non-detectable binding to BMP9, Applicant has generated a diverse array of novel variant polypeptides, many of which are characterized in part by unique ligand binding/inhibition profiles. Accordingly, these variants may be more useful than ActRIIB-GlFc in certain applications where such selective antagonism is advantageous. Examples include therapeutic applications where it is desirable to retain antagonism of activin B, while reducing antagonism of BMP9 and optionally one or more of activin A, GDF8, GDF11 and BMP10.

### Example 5: Generation of Variant ActRIIB-Fc Proteins

[0713] Applicants generated a series of mutations (sequence variations) in the extracellular domain of ActRIIB and produced these variant polypeptides as soluble homodimeric fusion proteins comprising a variant ActRIIB extracellular domain and an Fc domain joined by an optional linker. The background ActRIIB-Fc fusion was ActRIIB-G1Fc as shown in SEQ ID NO: 5.

[0714] Various substitution mutations were introduced into the background ActRIIB-Fc protein. Based on the data presented in Example 1, it is expected that these constructs, if expressed with a TPA leader, will lack the N-terminal serine. Mutations were generated in the ActRIIB extracellular domain by PCR mutagenesis. After PCR, fragments were purified through a Qiagen column, digested with SfoI and AgeI and gel purified. These fragments were ligated into expression vector pAID4 (see WO2006/012627) such that upon ligation it created fusion chimera with human IgG1. Upon transformation into E. coli DH5 alpha, colonies were picked and DNA was isolated. For murine constructs (mFc), a murine IgG2a was substituted for the human IgG1. Murine constructs have similar biological characteristics to corresponding human constructs. All mutants were sequence verified.

[0715] The amino acid sequence of unprocessed ActRIIB(K55A)-GlFc is shown below (SEQ ID NO: 31). The signal sequence and linker sequence are indicated by solid underline, and the K55A substitution is indicated by double underline. The amino acid sequence of SEQ ID NO:31 may optionally be provided with the lysine removed from the C-terminus. The GIFc region may also comprise a mutation to an alanine at position 234 or a mutation to an alanine at position 235, or a combination thereof.

1 MDAMKRGLCC VLLLCGAVFV SPGASGRGEA ETRECIYYNA NWELERTNQS
51 GLERCEGEQD ARLHCYASWR NSSGTIELVK KGCWLDDFNC YDRQECVATE
101 ENPQVYFCCC EGNFCNERFT HLPEAGGPEV TYEPPPTAPT GGGTHTCPPC
151 PAPELLGGPS VFLFPPKPKD TLMISRTPEV TCVVVDVSHE DPEVKFNWYV
201 DGVEVHNAKT KPREEQYNST YRVVSVLTVL HQDWLNGKEY KCKVSNKALP
251 APIEKTISKA KGQPREPQVY TLPPSREEMT KNQVSLTCLV KGFYPSDIAV
301 EWESNGQPEN NYKTTPPVLD SDGSFFLYSK LTVDKSRWQQ GNVFSCSVMH
351 EALHNHYTQK SLSLSPGK (SEQ ID NO: 31)

[0716] This ActRIIB(K55A)-GlFc fusion polypeptide is encoded by the following nucleic acid sequence (SEQ ID NO: 32):

1 ATGGATGCAA TGAAGAGAGG GCTCTGCTGT GTGCTGCTGC TGTGTGGAGC
51 AGTCTTCGTT TCGCCCGGCG CCTCTGGGCG TGGGGAGGCT GAGACACGGG
101 AGTGCATCTA CTACAACGCC AACTGGGAGC TGGAGCGCAC CAACCAGAGC
151 GGCCTGGAGC GCTGCGAAGG CGAGCAGGAC GCCCGGCTGC ACTGCTACGC
201 CTCCTGGCGC AACAGCTCTG GCACCATCGA GCTCGTGAAG AAGGGCTGCT
251 GGCTAGATGA CTTCAACTGC TACGATAGGC AGGAGTGTGT GGCCACTGAG
301 GAGAACCCCC AGGTGTACTT CTGCTGCTGT GAAGGCAACT TCTGCAACGA
351 GCGCTTCACT CATTTGCCAG AGGCTGGGGG CCCGGAAGTC ACGTACGAGC
401 CACCCCCGAC AGCCCCCACC GGTGGTGGAA CTCACACATG CCCACCGTGC
451 CCAGCACCTG AACTCCTGGG GGGACCGTCA GTCTTCCTCT TCCCCCCAAA
501 ACCCAAGGAC ACCCTCATGA TCTCCCGGAC CCCTGAGGTC ACATGCGTGG
551 TGGTGGACGT GAGCCACGAA GACCCTGAGG TCAAGTTCAA CTGGTACGTG
601 GACGGCGTGG AGGTGCATAA TGCCAAGACA AAGCCGCGGG AGGAGCAGTA
651 CAACAGCACG TACCGTGTGG TCAGCGTCCT CACCGTCCTG CACCAGGACT
701 GGCTGAATGG CAAGGAGTAC AAGTGCAAGG TCTCCAACAA AGCCCTCCCA
751 GCCCCCATCG AGAAAACCAT CTCCAAAGCC AAAGGGCAGC CCCGAGAACC
801 ACAGGTGTAC ACCCTGCCCC CATCCCGGGA GGAGATGACC AAGAACCAGG
851 TCAGCCTGAC CTGCCTGGTC AAAGGCTTCT ATCCCAGCGA CATCGCCGTG
901 GAGTGGGAGA GCAATGGGCA GCCGGAGAAC AACTACAAGA CCACGCCTCC
951 CGTGCTGGAC TCCGACGGCT CCTTCTTCCT CTATAGCAAG CTCACCGTGG
1001 ACAAGAGCAG GTGGCAGCAG GGGAACGTCT TCTCATGCTC CGTGATGCAT
1051 GAGGCTCTGC ACAACCACTA CACGCAGAAG AGCCTCTCCC TGTCCCCGGG
1101 TAAA (SEQ ID NO: 32)

[0717] The mature ActRIIB(K55A)-GlFc fusion polypeptide (SEQ ID NO: 33) is as follows and may optionally be provided with the lysine removed from the C-terminus. The GIFc region may also comprise a mutation to an alanine at position 234 or a mutation to an alanine at position 235, or a combination thereof.

1 GRGEAETREC IYYNANWELE RTNQSGLERC EGEQDARLHC YASWRNSSGT
51 IELVKKGCWL DDFNCYDRQE CVATEENPQV YFCCCEGNFC NERFTHLPEA
101 GGPEVTYEPP PTAPTGGGTH TCPPCPAPEL LGGPSVFLFP PKPKDTLMIS
151 RTPEVTCVVV DVSHEDPEVK FNWYVDGVEV HNAKTKPREE QYNSTYRVVS
201 VLTVLHQDWL NGKEYKCKVS NKALPAPIEK TISKAKGQPR EPQVYTLPPS
251 REEMTKNQVS LTCLVKGFYP SDIAVEWESN GQPENNYKTT PPVLDSDGSF
301 FLYSKLTVDK SRWQQGNVFS CSVMHEALHN HYTQKSLSLS PGK
(SEQ ID NO: 33)

[0718] The amino acid sequence of unprocessed ActRIIB(K55E)-GlFc is shown below (SEQ ID NO: 34). The signal sequence and linker sequence are indicated by solid underline, and the K55E substitution is indicated by double underline. The amino acid sequence of SEQ ID NO:34 may optionally be provided with the lysine removed from the C-terminus. The GIFc region may also comprise a mutation to an alanine at position 234 or a mutation to an alanine at position 235, or a combination thereof.

1 MDAMKRGLCC VLLLCGAVFV SPGASGRGEA ETRECIYYNA NWELERTNQS
51 GLERCEGEQD ERLHCYASWR NSSGTIELVK KGCWLDDFNC YDRQECVATE
101 ENPQVYFCCC EGNFCNERFT HLPEAGGPEV TYEPPPTAPT GGGTHTCPPC
151 PAPELLGGPS VFLFPPKPKD TLMISRTPEV TCVVVDVSHE DPEVKFNWYV
201 DGVEVHNAKT KPREEQYNST YRVVSVLTVL HQDWLNGKEY KCKVSNKALP
251 APIEKTISKA KGQPREPQVY TLPPSREEMT KNQVSLTCLV KGFYPSDIAV
301 EWESNGQPEN NYKTTPPVLD SDGSFFLYSK LTVDKSRWQQ GNVFSCSVMH
351 EALHNHYTQK SLSLSPGK (SEQ ID NO: 34)

[0719] This ActRIIB(K55E)-GlFc fusion polypeptide is encoded by the following nucleic acid sequence (SEQ ID NO: 35):

1 ATGGATGCAA TGAAGAGAGG GCTCTGCTGT GTGCTGCTGC TGTGTGGAGC
51 AGTCTTCGTT TCGCCCGGCG CCTCTGGGCG TGGGGAGGCT GAGACACGGG
101 AGTGCATCTA CTACAACGCC AACTGGGAGC TGGAGCGCAC CAACCAGAGC
151 GGCCTGGAGC GCTGCGAAGG CGAGCAGGAC GAGCGGCTGC ACTGCTACGC
201 CTCCTGGCGC AACAGCTCTG GCACCATCGA GCTCGTGAAG AAGGGCTGCT
251 GGCTAGATGA CTTCAACTGC TACGATAGGC AGGAGTGTGT GGCCACTGAG
301 GAGAACCCCC AGGTGTACTT CTGCTGCTGT GAAGGCAACT TCTGCAACGA
351 GCGCTTCACT CATTTGCCAG AGGCTGGGGG CCCGGAAGTC ACGTACGAGC
401 CACCCCCGAC AGCCCCCACC GGTGGTGGAA CTCACACATG CCCACCGTGC
451 CCAGCACCTG AACTCCTGGG GGGACCGTCA GTCTTCCTCT TCCCCCCAAA
501 ACCCAAGGAC ACCCTCATGA TCTCCCGGAC CCCTGAGGTC ACATGCGTGG
551 TGGTGGACGT GAGCCACGAA GACCCTGAGG TCAAGTTCAA CTGGTACGTG
601 GACGGCGTGG AGGTGCATAA TGCCAAGACA AAGCCGCGGG AGGAGCAGTA
651 CAACAGCACG TACCGTGTGG TCAGCGTCCT CACCGTCCTG CACCAGGACT
701 GGCTGAATGG CAAGGAGTAC AAGTGCAAGG TCTCCAACAA AGCCCTCCCA
751 GCCCCCATCG AGAAAACCAT CTCCAAAGCC AAAGGGCAGC CCCGAGAACC
801 ACAGGTGTAC ACCCTGCCCC CATCCCGGGA GGAGATGACC AAGAACCAGG
851 TCAGCCTGAC CTGCCTGGTC AAAGGCTTCT ATCCCAGCGA CATCGCCGTG
901 GAGTGGGAGA GCAATGGGCA GCCGGAGAAC AACTACAAGA CCACGCCTCC
951 CGTGCTGGAC TCCGACGGCT CCTTCTTCCT CTATAGCAAG CTCACCGTGG
1001 ACAAGAGCAG GTGGCAGCAG GGGAACGTCT TCTCATGCTC CGTGATGCAT
1051 GAGGCTCTGC ACAACCACTA CACGCAGAAG AGCCTCTCCC TGTCCCCGGG
1101 TAAA (SEQ ID NO: 35)

[0720] The mature ActRIIB(K55E)-GlFc fusion polypeptide (SEQ ID NO: 36) is as follows and may optionally be provided with the lysine removed from the C-terminus. The GIFc region may also comprise a mutation to an alanine at position 234 or a mutation to an alanine at position 235, or a combination thereof.

1 GRGEAETREC IYYNANWELE RTNQSGLERC EGEQDERLHC YASWRNSSGT
51 IELVKKGCWL DDFNCYDRQE CVATEENPQV YFCCCEGNFC NERFTHLPEA
101 GGPEVTYEPP PTAPTGGGTH TCPPCPAPEL LGGPSVFLFP PKPKDTLMIS
151 RTPEVTCVVV DVSHEDPEVK FNWYVDGVEV HNAKTKPREE QYNSTYRVVS
201 VLTVLHQDWL NGKEYKCKVS NKALPAPIEK TISKAKGQPR EPQVYTLPPS
251 REEMTKNQVS LTCLVKGFYP SDIAVEWESN GQPENNYKTT PPVLDSDGSF
301 FLYSKLTVDK SRWQQGNVFS CSVMHEALHN HYTQKSLSLS PGK
(SEQ ID NO: 36)

[0721] The amino acid sequence of unprocessed ActRIIB(F82I)-GlFc is shown below (SEQ ID NO: 37). The signal sequence and linker sequence are indicated by solid underline, _and the F82I substitution is indicated by double underline. The amino acid sequence of SEQ ID NO: 37 may optionally be provided with the lysine removed from the C-terminus. The GIFc region may also comprise a mutation to an alanine at position 234 or a mutation to an alanine at position 235, or a combination thereof.

1 MDAMKRGLCC VLLLCGAVFV SPGASGRGEA ETRECIYYNA NWELERTNQS
51 GLERCEGEQD KRLHCYASWR NSSGTIELVK KGCWLDDINC YDRQECVATE
101 ENPQVYFCCC EGNFCNERFT HLPEAGGPEV TYEPPPTAPT GGGTHTCPPC
151 PAPELLGGPS VFLFPPKPKD TLMISRTPEV TCVVVDVSHE DPEVKFNWYV
201 DGVEVHNAKT KPREEQYNST YRVVSVLTVL HQDWLNGKEY KCKVSNKALP
251 APIEKTISKA KGQPREPQVY TLPPSREEMT KNQVSLTCLV KGFYPSDIAV
301 EWESNGQPEN NYKTTPPVLD SDGSFFLYSK LTVDKSRWQQ GNVFSCSVMH
351 EALHNHYTQK SLSLSPGK (SEQ ID NO: 37)

[0722] This ActRIIB(F82I)-GlFc fusion polypeptide is encoded by the following nucleic acid sequence (SEQ ID NO: 38):

1 ATGGATGCAA TGAAGAGAGG GCTCTGCTGT GTGCTGCTGC TGTGTGGAGC
51 AGTCTTCGTT TCGCCCGGCG CCTCTGGGCG TGGGGAGGCT GAGACACGGG
101 AGTGCATCTA CTACAACGCC AACTGGGAGC TGGAGCGCAC CAACCAGAGC
151 GGCCTGGAGC GCTGCGAAGG CGAGCAGGAC AAGCGGCTGC ACTGCTACGC
201 CTCCTGGCGC AACAGCTCTG GCACCATCGA GCTCGTGAAG AAGGGCTGCT
251 GGCTAGATGA CATCAACTGC TACGATAGGC AGGAGTGTGT GGCCACTGAG
301 GAGAACCCCC AGGTGTACTT CTGCTGCTGT GAAGGCAACT TCTGCAACGA
351 GCGCTTCACT CATTTGCCAG AGGCTGGGGG CCCGGAAGTC ACGTACGAGC
401 CACCCCCGAC AGCCCCCACC GGTGGTGGAA CTCACACATG CCCACCGTGC
451 CCAGCACCTG AACTCCTGGG GGGACCGTCA GTCTTCCTCT TCCCCCCAAA
501 ACCCAAGGAC ACCCTCATGA TCTCCCGGAC CCCTGAGGTC ACATGCGTGG
551 TGGTGGACGT GAGCCACGAA GACCCTGAGG TCAAGTTCAA CTGGTACGTG
601 GACGGCGTGG AGGTGCATAA TGCCAAGACA AAGCCGCGGG AGGAGCAGTA
651 CAACAGCACG TACCGTGTGG TCAGCGTCCT CACCGTCCTG CACCAGGACT
701 GGCTGAATGG CAAGGAGTAC AAGTGCAAGG TCTCCAACAA AGCCCTCCCA
751 GCCCCCATCG AGAAAACCAT CTCCAAAGCC AAAGGGCAGC CCCGAGAACC
801 ACAGGTGTAC ACCCTGCCCC CATCCCGGGA GGAGATGACC AAGAACCAGG
851 TCAGCCTGAC CTGCCTGGTC AAAGGCTTCT ATCCCAGCGA CATCGCCGTG
901 GAGTGGGAGA GCAATGGGCA GCCGGAGAAC AACTACAAGA CCACGCCTCC
951 CGTGCTGGAC TCCGACGGCT CCTTCTTCCT CTATAGCAAG CTCACCGTGG
1001 ACAAGAGCAG GTGGCAGCAG GGGAACGTCT TCTCATGCTC CGTGATGCAT
1051 GAGGCTCTGC ACAACCACTA CACGCAGAAG AGCCTCTCCC TGTCTCCGGG
1101 TAAA (SEQ ID NO: 38)

[0723] The mature ActRIIB(F82I)-GlFc fusion polypeptide (SEQ ID NO: 39) is as follows and may optionally be provided with the lysine removed from the C-terminus. The GIFc region may also comprise a mutation to an alanine at position 234 or a mutation to an alanine at position 235, or a combination thereof.

1 GRGEAETREC IYYNANWELE RTNQSGLERC EGEQDKRLHC YASWRNSSGT
51 IELVKKGCWL DDINCYDRQE CVATEENPQV YFCCCEGNFC NERFTHLPEA
101 GGPEVTYEPP PTAPTGGGTH TCPPCPAPEL LGGPSVFLFP PKPKDTLMIS
151 RTPEVTCVVV DVSHEDPEVK FNWYVDGVEV HNAKTKPREE QYNSTYRVVS
201 VLTVLHQDWL NGKEYKCKVS NKALPAPIEK TISKAKGQPR EPQVYTLPPS
251 REEMTKNQVS LTCLVKGFYP SDIAVEWESN GQPENNYKTT PPVLDSDGSF
301 FLYSKLTVDK SRWQQGNVFS CSVMHEALHN HYTQKSLSLS PGK
(SEQ ID NO: 39)

[0724] The amino acid sequence of unprocessed ActRIIB(F82K)-GlFc is shown below (SEQ ID NO: 40). The signal sequence and linker sequence are indicated by solid underline, _and the F82K substitution is indicated by double underline. The amino acid sequence of SEQ ID NO: 40 may optionally be provided with the lysine removed from the C-terminus. The GIFc region may also comprise a mutation to an alanine at position 234 or a mutation to an alanine at position 235, or a combination thereof.

1 MDAMKRGLCC VLLLCGAVFV SPGASGRGEA ETRECIYYNA NWELERTNQS
51 GLERCEGEQD KRLHCYASWR NSSGTIELVK KGCWLDDKNC YDRQECVATE
101 ENPQVYFCCC EGNFCNERFT HLPEAGGPEV TYEPPPTAPT GGGTHTCPPC
151 PAPELLGGPS VFLFPPKPKD TLMISRTPEV TCVVVDVSHE DPEVKFNWYV
201 DGVEVHNAKT KPREEQYNST YRVVSVLTVL HQDWLNGKEY KCKVSNKALP
251 APIEKTISKA KGQPREPQVY TLPPSREEMT KNQVSLTCLV KGFYPSDIAV
301 EWESNGQPEN NYKTTPPVLD SDGSFFLYSK LTVDKSRWQQ GNVFSCSVMH
351 EALHNHYTQK SLSLSPGK (SEQ ID NO: 40)

[0725] This ActRIIB(F82K)-GlFc fusion polypeptide is encoded by the following nucleic acid sequence (SEQ ID NO: 41):

1 ATGGATGCAA TGAAGAGAGG GCTCTGCTGT GTGCTGCTGC TGTGTGGAGC
51 AGTCTTCGTT TCGCCCGGCG CCTCTGGGCG TGGGGAGGCT GAGACACGGG
101 AGTGCATCTA CTACAACGCC AACTGGGAGC TGGAGCGCAC CAACCAGAGC
151 GGCCTGGAGC GCTGCGAAGG CGAGCAGGAC AAGCGGCTGC ACTGCTACGC
201 CTCCTGGCGC AACAGCTCTG GCACCATCGA GCTCGTGAAG AAGGGCTGCT
251 GGCTAGATGA CAAGAACTGC TACGATAGGC AGGAGTGTGT GGCCACTGAG
301 GAGAACCCCC AGGTGTACTT CTGCTGCTGT GAAGGCAACT TCTGCAACGA
351 GCGCTTCACT CATTTGCCAG AGGCTGGGGG CCCGGAAGTC ACGTACGAGC
401 CACCCCCGAC AGCCCCCACC GGTGGTGGAA CTCACACATG CCCACCGTGC
451 CCAGCACCTG AACTCCTGGG GGGACCGTCA GTCTTCCTCT TCCCCCCAAA
501 ACCCAAGGAC ACCCTCATGA TCTCCCGGAC CCCTGAGGTC ACATGCGTGG
551 TGGTGGACGT GAGCCACGAA GACCCTGAGG TCAAGTTCAA CTGGTACGTG
601 GACGGCGTGG AGGTGCATAA TGCCAAGACA AAGCCGCGGG AGGAGCAGTA
651 CAACAGCACG TACCGTGTGG TCAGCGTCCT CACCGTCCTG CACCAGGACT
701 GGCTGAATGG CAAGGAGTAC AAGTGCAAGG TCTCCAACAA AGCCCTCCCA
751 GCCCCCATCG AGAAAACCAT CTCCAAAGCC AAAGGGCAGC CCCGAGAACC
801 ACAGGTGTAC ACCCTGCCCC CATCCCGGGA GGAGATGACC AAGAACCAGG
851 TCAGCCTGAC CTGCCTGGTC AAAGGCTTCT ATCCCAGCGA CATCGCCGTG
901 GAGTGGGAGA GCAATGGGCA GCCGGAGAAC AACTACAAGA CCACGCCTCC
951 CGTGCTGGAC TCCGACGGCT CCTTCTTCCT CTATAGCAAG CTCACCGTGG
1001 ACAAGAGCAG GTGGCAGCAG GGGAACGTCT TCTCATGCTC CGTGATGCAT
1051 GAGGCTCTGC ACAACCACTA CACGCAGAAG AGCCTCTCCC TGTCTCCGGG
1101 TAAA (SEQ ID NO: 41)

[0726] The mature ActRIIB(F82K)-GlFc fusion polypeptide (SEQ ID NO: 42) is as follows and may optionally be provided with the lysine removed from the C-terminus, and the GIFc region may also comprise a mutation to an alanine at position 234 or a mutation to an alanine at position 235, or a combination thereof.

1 GRGEAETREC IYYNANWELE RTNQSGLERC EGEQDKRLHC YASWRNSSGT
51 IELVKKGCWL DDKNCYDRQE CVATEENPQV YFCCCEGNFC NERFTHLPEA
101 GGPEVTYEPP PTAPTGGGTH TCPPCPAPEL LGGPSVFLFP PKPKDTLMIS
151 RTPEVTCVVV DVSHEDPEVK FNWYVDGVEV HNAKTKPREE QYNSTYRVVS
201 VLTVLHQDWL NGKEYKCKVS NKALPAPIEK TISKAKGQPR EPQVYTLPPS
251 REEMTKNQVS LTCLVKGFYP SDIAVEWESN GQPENNYKTT PPVLDSDGSF
301 FLYSKLTVDK SRWQQGNVFS CSVMHEALHN HYTQKSLSLS PGK
(SEQ ID NO: 42)

[0727] The amino acid sequence of unprocessed ActRIIB(F82K)-GlFc (LALA) is shown below (SEQ ID NO: 522). The signal sequence and linker sequence are indicated by solid underline, and the F82K substitution is indicated by double underline. The amino acid sequence of SEQ ID NO: 522 may optionally be provided with the lysine removed from the C-terminus.

1 MDAMKRGLCC VLLLCGAVFV SPGASGRGEA ETRECIYYNA NWELERTNQS
51 GLERCEGEQD KRLHCYASWR NSSGTIELVK KGCWLDDKNC YDRQECVATE
101 ENPQVYFCCC EGNFCNERFT HLPEAGGPEV TYEPPPTAPT GGGTHTCPPC
151 PAPEAAGGPS VFLFPPKPKD TLMISRTPEV TCVVVDVSHE DPEVKFNWYV
201 DGVEVHNAKT KPREEQYNST YRVVSVLTVL HQDWLNGKEY KCKVSNKALP
251 APIEKTISKA KGQPREPQVY TLPPSREEMT KNQVSLTCLV KGFYPSDIAV
301 EWESNGQPEN NYKTTPPVLD SDGSFFLYSK LTVDKSRWQQ GNVFSCSVMH
351 EALHNHYTQK SLSLSPGK (SEQ ID NO: 522)

[0728] This ActRIIB(F82K)-GlFc (LALA) fusion polypeptide is encoded by the following nucleic acid sequence (SEQ ID NO: 523):

1 ATGGATGCAA TGAAGAGAGG GCTCTGCTGT GTGCTGCTGC TGTGTGGAGC
51 AGTCTTCGTT TCGCCCGGCG CCTCTGGGCG TGGGGAGGCT GAGACACGGG
101 AGTGCATCTA CTACAACGCC AACTGGGAGC TGGAGCGCAC CAACCAGAGC
151 GGCCTGGAGC GCTGCGAAGG CGAGCAGGAC AAGCGGCTGC ACTGCTACGC
201 CTCCTGGCGC AACAGCTCTG GCACCATCGA GCTCGTGAAG AAGGGCTGCT
251 GGCTAGATGA CAAGAACTGC TACGATAGGC AGGAGTGTGT GGCCACTGAG
301 GAGAACCCCC AGGTGTACTT CTGCTGCTGT GAAGGCAACT TCTGCAACGA
351 GCGCTTCACT CATTTGCCAG AGGCTGGGGG CCCGGAAGTC ACGTACGAGC
401 CACCCCCGAC AGCCCCCACC GGTGGTGGAA CTCACACATG CCCACCGTGC
451 CCAGCACCTG AAGCCGCTGG GGGACCGTCA GTCTTCCTCT TCCCCCCAAA
501 ACCCAAGGAC ACCCTCATGA TCTCCCGGAC CCCTGAGGTC ACATGCGTGG
551 TGGTGGACGT GAGCCACGAA GACCCTGAGG TCAAGTTCAA CTGGTACGTG
601 GACGGCGTGG AGGTGCATAA TGCCAAGACA AAGCCGCGGG AGGAGCAGTA
651 CAACAGCACG TACCGTGTGG TCAGCGTCCT CACCGTCCTG CACCAGGACT
701 GGCTGAATGG CAAGGAGTAC AAGTGCAAGG TCTCCAACAA AGCCCTCCCA
751 GCCCCCATCG AGAAAACCAT CTCCAAAGCC AAAGGGCAGC CCCGAGAACC
801 ACAGGTGTAC ACCCTGCCCC CATCCCGGGA GGAGATGACC AAGAACCAGG
851 TCAGCCTGAC CTGCCTGGTC AAAGGCTTCT ATCCCAGCGA CATCGCCGTG
901 GAGTGGGAGA GCAATGGGCA GCCGGAGAAC AACTACAAGA CCACGCCTCC
951 CGTGCTGGAC TCCGACGGCT CCTTCTTCCT CTATAGCAAG CTCACCGTGG
1001 ACAAGAGCAG GTGGCAGCAG GGGAACGTCT TCTCATGCTC CGTGATGCAT
1051 GAGGCTCTGC ACAACCACTA CACGCAGAAG AGCCTCTCCC TGTCCCCGGG
1101 TTGA (SEQ ID NO: 523)

[0729] The mature ActRIIB(F82K)-GlFc (LALA) fusion polypeptide (SEQ ID NO: 524) is as follows and may optionally be provided with the lysine removed from the C-terminus:

1 GRGEAETREC IYYNANWELE RTNQSGLERC EGEQDKRLHC YASWRNSSGT
51 IELVKKGCWL DDKNCYDRQE CVATEENPQV YFCCCEGNFC NERFTHLPEA
101 GGPEVTYEPP PTAPTGGGTH TCPPCPAPEA AGGPSVFLFP PKPKDTLMIS
151 RTPEVTCVVV DVSHEDPEVK FNWYVDGVEV HNAKTKPREE QYNSTYRVVS
201 VLTVLHQDWL NGKEYKCKVS NKALPAPIEK TISKAKGQPR EPQVYTLPPS
251 REEMTKNQVS LTCLVKGFYP SDIAVEWESN GQPENNYKTT PPVLDSDGSF
301 FLYSKLTVDK SRWQQGNVFS CSVMHEALHN HYTQKSLSLS PGK
(SEQ ID NO: 524)

[0730] Constructs were expressed in COS or CHO cells and purified by filtration and protein A chromatography. In some instances, assays were performed with conditioned medium rather than purified proteins. Purity of samples for reporter gene assays was evaluated by SDS-PAGE and Western blot analysis.

[0731] Mutants were tested in binding assays and/or bioassays described below.

[0732] Alternatively, similar mutations could be introduced into an ActRIIB extracellular domain possessing an N-terminal truncation of five amino acids and a C-terminal truncation of three amino acids as shown below (SEQ ID NO: 53). This truncated ActRIIB extracellular domain is denoted ActRIIB(25-131) based on numbering in SEQ ID NO: 2.

25 ETRECIYYNA NWELERTNQS GLERCEGEQD KRLHCYASWR NSSGTIELVK
75 KGCWLDDFNC YDRQECVATE ENPQVYFCCC EGNFCNERFT HLPEAGGPEV
125 TYEPPPT (SEQ ID NO: 53)

[0733] The corresponding background fusion polypeptide, ActRIIB(25-131)-GlFc, is shown below (SEQ ID NO: 12).

1 ETRECIYYNA NWELERTNQS GLERCEGEQD KRLHCYASWR NSSGTIELVK
51 KGCWLDDFNC YDRQECVATE ENPQVYFCCC EGNFCNERFT HLPEAGGPEV
101 TYEPPPTGGG THTCPPCPAP ELLGGPSVFL FPPKPKDTLM ISRTPEVTCV
151 VVDVSHEDPE VKFNWYVDGV EVHNAKTKPR EEQYNSTYRV VSVLTVLHQD
201 WLNGKEYKCK VSNKALPAPI EKTISKAKGQ PREPQVYTLP PSREEMTKNQ
251 VSLTCLVKGF YPSDIAVEWE SNGQPENNYK TTPPVLDSDG SFFLYSKLTV
301 DKSRWQQGNV FSCSVMHEAL HNHYTQKSLS LSPGK (SEQ ID NO: 12)

### Example 6. Ligand Binding Profiles of Variant ActRIIB-Fc Homodimers and Activity of Variant ActRIIB-Fc Proteins in a Cell-Based Assay

[0734] To determine ligand binding profiles of variant ActRIIB-Fc homodimers, a Biacore™-based binding assay was used to compare ligand binding kinetics of certain variant ActRIIB-Fc proteins. ActRIIB-Fc proteins to be tested were independently captured onto the system using an anti-Fc antibody. Ligands were then injected and allowed to flow over the captured receptor protein. Results of variant ActRIIB-Fc proteins analyzed at 37° C. are shown in FIG. 9. Compared to Fc-fusion protein comprising unmodified ActRIIB extracellular domain, the variant proteins ActRIIB(K55A)-Fc, ActRIIB(K55E)-Fc, ActRIIB(F82I)-Fc, and ActRIIB(F82K)-Fc exhibited greater reduction in their affinity for BMP9 than for GDF11. Results of additional variant ActRIIB-Fc proteins analyzed at 25° C. are shown in FIG. 10.

[0735] These results confirm K55A, K55E, F82I, and F82K as substitutions that reduce ActRIIB binding affinity for BMP9 more than they reduce ActRIIB affinity for activin A or GDF11. Accordingly, these variant ActRIIB-Fc proteins may be more useful than unmodified ActRIIB-Fc protein in certain applications where such selective antagonism is advantageous. Examples include therapeutic applications where it is desirable to retain antagonism of one or more of activin A, activin B, GDF8, and GDF11 while reducing antagonism of BMP9.

[0736] To determine activity of variant ActRIIB-Fc proteins, an A204 cell-based assay was used to compare effects among variant ActRIIB-Fc proteins on signaling by activin A, GDF11, and BMP9. In brief, this assay uses a human A204 rhabdomyosarcoma cell line (ATCC^{®}: HTB-82™) derived from muscle and the reporter vector pGL3(CAGA)12 (Dennler et al., 1998, EMBO 17: 3091-3100) as well as a Renilla reporter plasmid (pRLCMV) to control for transfection efficiency. The CAGA12 motif is present in TGF-β responsive genes (e.g., PAI-1 gene), so this vector is of general use for ligands that can signal through Smad2/3, including activin A, GDF11, and BMP9.

[0737] On day 1, A-204 cells were transferred into one or more 48-well plates. On day 2, these cells were transfected with 10 µg pGL3(CAGA)12 or pGL3(CAGA)12(10 µg) + pRLCMV (1 µg) and Fugene. On day 3, ligands diluted in medium containing 0.1% BSA were preincubated with ActRIIB-Fc proteins for 1 hr before addition to cells. Approximately six hour later, the cells were rinsed with PBS and lysed. Cell lysates were analyzed in a luciferase assay to determine the extent of Smad activation.

[0738] This assay was used to screen variant ActRIIB-Fc proteins for inhibitory effects on cell signaling by activin A, GDF11, and BMP9. Potencies of homodimeric Fc fusion proteins incorporating amino acid substitutions in the human ActRIIB extracellular domain were compared with that of an Fc fusion protein comprising unmodified human ActRIIB extracellular domain.

Inhibitory Potency of Homodimeric ActRIIB-Fc Constructs

| ActRIIB protein | IC₅₀ (ng/mL) | | |
|---|---|---|---|
| | Activin A | GDF11 | BMP9 |
| Wild-type | 8 | 9 | 31 |
| A24N | 128 | 99 | 409 |
| R40A | --- | 591 | 1210 |
| E50K | 132 | 180 | 721 |
| E50P | 756 | 638 | ~3000 |
| E52A | 198 | 71 | 359 |
| E52K | 762 | 296 | ∼10000 |
| K55A | 15 | 11 | 122 |
| K55D | 396 | 365 | 5500 |
| K55E | 19 | 14 | 290 |
| K55R | 206 | 318 | 777 |
| Y60K | --- | 414 | ND |
| Y60P | --- | 544 | ND |
| K74R | --- | 45 | 165 |
| K74Y | --- | ND | ND |
| K74A / L79P | --- | ND | ND |
| L79K | --- | 477 | ND |
| L79P | --- | ND | ND |
| L79R | --- | 234 | ND |
| D80A | --- | ND | ND |
| F82I | 11 | 9 | 277 |
| F82K | 10 | 15 | ~5000 |
| F82W | --- | 276 | ND |
| F82W / N83A | --- | 389 | ~40000 |
| V99E | --- | ND | ND |
| V99K | --- | ND | --- |

ND: not detectable over concentration range tested --- Not tested

[0739] As shown in the table above, single amino acid substitutions in the ActRIIB extracellular domain can alter the balance between activin A or GDF11 inhibition and BMP9 inhibition in a cell-based reporter gene assay. Compared to a fusion protein containing unmodified ActRIIB extracellular domain, the variants ActRIIB(K55A)-Fc, ActRIIB(K55E)-Fc, ActRIIB(F82I)-Fc, and ActRIIB(F82K)-Fc showed less potent inhibition of BMP9 (increased IC₅₀ values) while maintaining essentially undiminished inhibition of activin A and GDF11.

[0740] These results indicate that variant ActRIIB-Fc proteins such as ActRIIB(K55A)-Fc, ActRIIB(K55E)-Fc, ActRIIB(F82I)-Fc, and ActRIIB(F82K)-Fc are more selective antagonists of activin A and GDF11compared to an Fc fusion protein comprising unmodified ActRIIB extracellular domain. Accordingly, these variants may be more useful than ActRIIB-Fc in certain applications where such selective antagonism is advantageous. Examples include therapeutic applications where it is desirable to retain antagonism of one or more of activin A, GDF8, and GDF11while reducing antagonism of BMP9 and potentially BMP10.

### Example 7. Generation of an ActRIIB-Fc:ActRIIB(L79E)-Fc Heterodimer

[0741] Applicants envision generation of a soluble ActRIIB-Fc:ActRIIB(L79E)-Fc heteromeric complex comprising the extracellular domains of unmodified human ActRIIB and human ActRIIB with a leucine-to-glutamate substitution at position 79, which are each separately fused to an GlFc domain with a linker positioned between the extracellular domain and the GlFc domain. The individual constructs are referred to as ActRIIB-Fc fusion polypeptide and ActRIIB(L79E)-Fc fusion polypeptide, respectively, and the sequences for each are provided below.

[0742] A methodology for promoting formation of ActRIIB-Fc:ActRIIB(L79E)-Fc heteromeric complexes, as opposed to the ActRIIB-Fc or ActRIIB(L79E)-Fc homodimeric complexes, is to introduce alterations in the amino acid sequence of the Fc domains to guide the formation of asymmetric heteromeric complexes. Many different approaches to making asymmetric interaction pairs using Fc domains are described in this disclosure.

[0743] In one approach, illustrated in the ActRIIB(L79E)-Fc and ActRIIB-Fc polypeptide sequences of SEQ ID NOs: 43-45 and 46-48, respectively, one Fc domain can be altered to introduce cationic amino acids at the interaction face, while the other Fc domain can be altered to introduce anionic amino acids at the interaction face. The ActRIIB(L79E)-Fc fusion polypeptide and ActRIIB-Fc fusion polypeptide can each employ the TPA leader (SEQ ID NO: 8).

[0744] The ActRIIB(L79E)-Fc polypeptide sequence (SEQ ID NO: 43) is shown below:

1 MDAMKRGLCC VLLLCGAVFV SPGASGRGEA ETRECIYYNA NWELERTNQS
51 GLERCEGEQD KRLHCYASWR NSSGTIELVK KGCWEDDFNC YDRQECVATE
101 ENPQVYFCCC EGNFCNERFT HLPEAGGPEV TYEPPPTAPT GGGTHTCPPC
151 PAPELLGGPS VFLFPPKPKD TLMISRTPEV TCVVVDVSHE DPEVKFNWYV
201 DGVEVHNAKT KPREEQYNST YRVVSVLTVL HQDWLNGKEY KCKVSNKALP
251 APIEKTISKA KGQPREPQVY TLPPSREEMT KNQVSLTCLV KGFYPSDIAV
301 EWESNGQPEN NYDTTPPVLD SDGSFFLYSD LTVDKSRWQQ GNVFSCSVMH
351 EALHNHYTQK SLSLSPG (SEQ ID NO: 43)

[0745] The leader (signal) sequence and linker are underlined, and the L79E substitution is indicated by double underline. To promote formation of the ActRIIB-Fc:ActRIIB(L79E)-Fc heterodimer rather than either of the possible homodimeric complexes, two amino acid substitutions (replacing lysines with acidic amino acids) can be introduced into the Fc domain of the ActRIIB fusion protein as indicated by double underline above. The amino acid sequence of SEQ ID NO: 43 may optionally be provided with lysine added to the C-terminus. The GIFc region may also comprise a mutation to an alanine at position 234 or a mutation to an alanine at position 235, or a combination thereof.

[0746] This ActRIIB(L79E)-Fc fusion protein can be encoded by the following nucleic acid sequence (SEQ ID NO: 44):

1 ATGGATGCAA TGAAGAGAGG GCTCTGCTGT GTGCTGCTGC TGTGTGGAGC
51 AGTCTTCGTT TCGCCCGGCG CCTCTGGGCG TGGGGAGGCT GAGACACGGG
101 AGTGCATCTA CTACAACGCC AACTGGGAGC TGGAGCGCAC CAACCAGAGC
151 GGCCTGGAGC GCTGCGAAGG CGAGCAGGAC AAGCGGCTGC ACTGCTACGC
201 CTCCTGGCGC AACAGCTCTG GCACCATCGA GCTCGTGAAG AAGGGCTGCT
251 GGGAAGATGA CTTCAACTGC TACGATAGGC AGGAGTGTGT GGCCACTGAG
301 GAGAACCCCC AGGTGTACTT CTGCTGCTGT GAAGGCAACT TCTGCAACGA
351 GCGCTTCACT CATTTGCCAG AGGCTGGGGG CCCGGAAGTC ACGTACGAGC
401 CACCCCCGAC AGCCCCCACC GGTGGTGGAA CTCACACATG CCCACCGTGC
451 CCAGCACCTG AACTCCTGGG GGGACCGTCA GTCTTCCTCT TCCCCCCAAA
501 ACCCAAGGAC ACCCTCATGA TCTCCCGGAC CCCTGAGGTC ACATGCGTGG
551 TGGTGGACGT GAGCCACGAA GACCCTGAGG TCAAGTTCAA CTGGTACGTG
601 GACGGCGTGG AGGTGCATAA TGCCAAGACA AAGCCGCGGG AGGAGCAGTA
651 CAACAGCACG TACCGTGTGG TCAGCGTCCT CACCGTCCTG CACCAGGACT
701 GGCTGAATGG CAAGGAGTAC AAGTGCAAGG TCTCCAACAA AGCCCTCCCA
751 GCCCCCATCG AGAAAACCAT CTCCAAAGCC AAAGGGCAGC CCCGAGAACC
801 ACAGGTGTAC ACCCTGCCCC CATCCCGGGA GGAGATGACC AAGAACCAGG
851 TCAGCCTGAC CTGCCTGGTC AAAGGCTTCT ATCCCAGCGA CATCGCCGTG
901 GAGTGGGAGA GCAATGGGCA GCCGGAGAAC AACTACGACA CCACGCCTCC
951 CGTGCTGGAC TCCGACGGCT CCTTCTTCCT CTATAGCGAC CTCACCGTGG
1001 ACAAGAGCAG GTGGCAGCAG GGGAACGTCT TCTCATGCTC CGTGATGCAT
1051 GAGGCTCTGC ACAACCACTA CACGCAGAAG AGCCTCTCCC TGTCTCCGGG
1101 T (SEQ ID NO: 44)

[0747] The mature ActRIIB(L79E)-Fc fusion polypeptide (SEQ ID NO: 45) is as follows, and may optionally be provided with lysine added to the C-terminus. The GIFc region may also comprise a mutation to an alanine at position 234 or a mutation to an alanine at position 235, or a combination thereof.

1 GRGEAETREC IYYNANWELE RTNQSGLERC EGEQDKRLHC YASWRNSSGT
51 IELVKKGCWE DDFNCYDRQE CVATEENPQV YFCCCEGNFC NERFTHLPEA
101 GGPEVTYEPP PTAPTGGGTH TCPPCPAPEL LGGPSVFLFP PKPKDTLMIS
151 RTPEVTCVVV DVSHEDPEVK FNWYVDGVEV HNAKTKPREE QYNSTYRVVS
201 VLTVLHQDWL NGKEYKCKVS NKALPAPIEK TISKAKGQPR EPQVYTLPPS
251 REEMTKNQVS LTCLVKGFYP SDIAVEWESN GQPENNYDTT PPVLDSDGSF
301 FLYSDLTVDK SRWQQGNVFS CSVMHEALHN HYTQKSLSLS PG
(SEQ ID NO: 45)

[0748] The complementary form of ActRIIB-Fc fusion polypeptide (SEQ ID NO: 46) is as follows:

1 MDAMKRGLCC VLLLCGAVFV SPGASGRGEA ETRECIYYNA NWELERTNQS
51 GLERCEGEQD KRLHCYASWR NSSGTIELVK KGCWLDDFNC YDRQECVATE
101 ENPQVYFCCC EGNFCNERFT HLPEAGGPEV TYEPPPTAPT GGGTHTCPPC
151 PAPELLGGPS VFLFPPKPKD TLMISRTPEV TCVVVDVSHE DPEVKFNWYV
201 DGVEVHNAKT KPREEQYNST YRVVSVLTVL HQDWLNGKEY KCKVSNKALP
251 APIEKTISKA KGQPREPQVY TLPPSRKEMT KNQVSLTCLV KGFYPSDIAV
301 EWESNGQPEN NYKTTPPVLK SDGSFFLYSK LTVDKSRWQQ GNVFSCSVMH
351 EALHNHYTQK SLSLSPGK (SEQ ID NO: 46)

[0749] The leader sequence and linker sequence are underlined. To guide heterodimer formation with the ActRIIB(L79E)-Fc fusion polypeptide of SEQ ID NOs: 43 and 45 above, two amino acid substitutions (replacing a glutamate and an aspartate with lysines) can be introduced into the Fc domain of the ActRIIB-Fc fusion polypeptide as indicated by double underline above. The amino acid sequence of SEQ ID NO: 46 may optionally be provided with lysine removed from the C-terminus. The GIFc region may also comprise a mutation to an alanine at position 234 or a mutation to an alanine at position 235, or a combination thereof.

[0750] This ActRIIB-Fc fusion protein can be encoded by the following nucleic acid (SEQ ID NO: 47):

1 ATGGATGCAA TGAAGAGAGG GCTCTGCTGT GTGCTGCTGC TGTGTGGAGC
51 AGTCTTCGTT TCGCCCGGCG CCTCTGGGCG TGGGGAGGCT GAGACACGGG
101 AGTGCATCTA CTACAACGCC AACTGGGAGC TGGAGCGCAC CAACCAGAGC
151 GGCCTGGAGC GCTGCGAAGG CGAGCAGGAC AAGCGGCTGC ACTGCTACGC
201 CTCCTGGCGC AACAGCTCTG GCACCATCGA GCTCGTGAAG AAGGGCTGCT
251 GGCTAGATGA CTTCAACTGC TACGATAGGC AGGAGTGTGT GGCCACTGAG
301 GAGAACCCCC AGGTGTACTT CTGCTGCTGT GAAGGCAACT TCTGCAACGA
351 GCGCTTCACT CATTTGCCAG AGGCTGGGGG CCCGGAAGTC ACGTACGAGC
401 CACCCCCGAC AGCCCCCACC GGTGGTGGAA CTCACACATG CCCACCGTGC
451 CCAGCACCTG AACTCCTGGG GGGACCGTCA GTCTTCCTCT TCCCCCCAAA
501 ACCCAAGGAC ACCCTCATGA TCTCCCGGAC CCCTGAGGTC ACATGCGTGG
551 TGGTGGACGT GAGCCACGAA GACCCTGAGG TCAAGTTCAA CTGGTACGTG
601 GACGGCGTGG AGGTGCATAA TGCCAAGACA AAGCCGCGGG AGGAGCAGTA
651 CAACAGCACG TACCGTGTGG TCAGCGTCCT CACCGTCCTG CACCAGGACT
701 GGCTGAATGG CAAGGAGTAC AAGTGCAAGG TCTCCAACAA AGCCCTCCCA
751 GCCCCCATCG AGAAAACCAT CTCCAAAGCC AAAGGGCAGC CCCGAGAACC
801 ACAGGTGTAC ACCCTGCCCC CATCCCGGAA GGAGATGACC AAGAACCAGG
851 TCAGCCTGAC CTGCCTGGTC AAAGGCTTCT ATCCCAGCGA CATCGCCGTG
901 GAGTGGGAGA GCAATGGGCA GCCGGAGAAC AACTACAAGA CCACGCCTCC
951 CGTGCTGAAG TCCGACGGCT CCTTCTTCCT CTATAGCAAG CTCACCGTGG
1001 ACAAGAGCAG GTGGCAGCAG GGGAACGTCT TCTCATGCTC CGTGATGCAT
1051 GAGGCTCTGC ACAACCACTA CACGCAGAAG AGCCTCTCCC TGTCTCCGGG
1101 TAAA (SEQ ID NO: 47)

[0751] The mature ActRIIB-Fc fusion protein sequence (SEQ ID NO: 48) is as follows and may optionally be provided with lysine removed from the C-terminus. The GIFc region may also comprise a mutation to an alanine at position 234 or a mutation to an alanine at position 235, or a combination thereof.

1 GRGEAETREC IYYNANWELE RTNQSGLERC EGEQDKRLHC YASWRNSSGT
51 IELVKKGCWL DDFNCYDRQE CVATEENPQV YFCCCEGNFC NERFTHLPEA
101 GGPEVTYEPP PTAPTGGGTH TCPPCPAPEL LGGPSVFLFP PKPKDTLMIS
151 RTPEVTCVVV DVSHEDPEVK FNWYVDGVEV HNAKTKPREE QYNSTYRVVS
201 VLTVLHQDWL NGKEYKCKVS NKALPAPIEK TISKAKGQPR EPQVYTLPPS
251 RKEMTKNQVS LTCLVKGFYP SDIAVEWESN GQPENNYKTT PPVLKSDGSF
301 FLYSKLTVDK SRWQQGNVFS CSVMHEALHN HYTQKSLSLS PGK
(SEQ ID NO: 48)

[0752] The ActRIIB(L79E)-Fc and ActRIIB-Fc polypeptides of SEQ ID NO: 45 and SEQ ID NO: 48, respectively, may be co-expressed and purified from a CHO cell line, to give rise to a heteromeric protein complex comprising ActRIIB-Fc:ActRIIB(L79E)-Fc.

[0753] In another approach to promote the formation of heteromultimer complexes using asymmetric Fc fusion proteins, the Fc domains can be altered to introduce complementary hydrophobic interactions and an additional intermolecular disulfide bond as illustrated in the ActRIIB(L79E)-Fc and ActRIIB-Fc polypeptide sequences of SEQ ID NOs: 49-50 and 51-52, respectively. The ActRIIB(L79E)-Fc fusion polypeptide and ActRIIB-Fc fusion polypeptide can each employ the TPAleader (SEQ ID NO: 8). ActRIIB(L79E)-Fc polypeptide sequence (SEQ ID NO: 49) is shown below:

1 MDAMKRGLCC VLLLCGAVFV SPGASGRGEA ETRECIYYNA NWELERTNQS
51 GLERCEGEQD KRLHCYASWR NSSGTIELVK KGCWEDDFNC YDRQECVATE
101 ENPQVYFCCC EGNFCNERFT HLPEAGGPEV TYEPPPTAPT GGGTHTCPPC
151 PAPELLGGPS VFLFPPKPKD TLMISRTPEV TCVVVDVSHE DPEVKFNWYV
201 DGVEVHNAKT KPREEQYNST YRVVSVLTVL HQDWLNGKEY KCKVSNKALP
251 APIEKTISKA KGQPREPQVY TLPPCREEMT KNQVSLWCLV KGFYPSDIAV
301 EWESNGQPEN NYKTTPPVLD SDGSFFLYSK LTVDKSRWQQ GNVFSCSVMH
351 EALHNHYTQK SLSLSPG (SEQ ID NO: 49)

[0754] The signal sequence and linker sequence are underlined, and the L79E substitution is indicated by double underline. To promote formation of the ActRIIB-Fc:ActRIIB(L79E)-Fc heterodimer rather than either of the possible homodimeric complexes, two amino acid substitutions (replacing a serine with a cysteine and a threonine with a tryptophan) can be introduced into the Fc domain of the fusion protein as indicated by double underline above. The amino acid sequence of SEQ ID NO: 49 may optionally be provided with lysine added to the C-terminus. The GIFc region may also comprise a mutation to an alanine at position 234 or a mutation to an alanine at position 235, or a combination thereof. Mature ActRIIB(L79E)-Fc fusion polypeptide (SEQ ID NO: 50) is as follows:

1 GRGEAETREC IYYNANWELE RTNQSGLERC EGEQDKRLHC YASWRNSSGT
51 IELVKKGCWE DDFNCYDRQE CVATEENPQV YFCCCEGNFC NERFTHLPEA
101 GGPEVTYEPP PTAPTGGGTH TCPPCPAPEL LGGPSVFLFP PKPKDTLMIS
151 RTPEVTCVVV DVSHEDPEVK FNWYVDGVEV HNAKTKPREE QYNSTYRVVS
201 VLTVLHQDWL NGKEYKCKVS NKALPAPIEK TISKAKGQPR EPQVYTLPPC
251 REEMTKNQVS LWCLVKGFYP SDIAVEWESN GQPENNYKTT PPVLDSDGSF
301 FLYSKLTVDK SRWQQGNVFS CSVMHEALHN HYTQKSLSLS PG
(SEQ ID NO: 50)

[0755] The complementary form of ActRIIB-Fc fusion polypeptide (SEQ ID NO: 51) is as follows and may optionally be provided with lysine removed from the C-terminus. The GIFc region may also comprise a mutation to an alanine at position 234 or a mutation to an alanine at position 235, or a combination thereof.

1 MDAMKRGLCC VLLLCGAVFV SPGASGRGEA ETRECIYYNA NWELERTNQS
51 GLERCEGEQD KRLHCYASWR NSSGTIELVK KGCWLDDFNC YDRQECVATE
101 ENPQVYFCCC EGNFCNERFT HLPEAGGPEV TYEPPPTAPT GGGTHTCPPC
151 PAPELLGGPS VFLFPPKPKD TLMISRTPEV TCVVVDVSHE DPEVKFNWYV
201 DGVEVHNAKT KPREEQYNST YRVVSVLTVL HQDWLNGKEY KCKVSNKALP
251 APIEKTISKA KGQPREPQVC TLPPSREEMT KNQVSLSCAV KGFYPSDIAV
301 EWESNGQPEN NYKTTPPVLD SDGSFFLVSK LTVDKSRWQQ GNVFSCSVMH
351 EALHNHYTQK SLSLSPGK (SEQ ID NO: 51)

[0756] The leader sequence and linker are underlined. To guide heterodimer formation with the ActRIIB(L79E)-Fc fusion polypeptide of SEQ ID NOs: 49-50 above, four amino acid substitutions (replacement of tyrosine with cysteine, threonine with serine, leucine with alanine, and tyrosine with valine) can be introduced into the Fc domain of the ActRIIB-Fc fusion polypeptide as indicated by double underline above. The amino acid sequence of SEQ ID NO: 51 may optionally be provided with lysine removed from the C-terminus. The GIFc region may also comprise a mutation to an alanine at position 234 or a mutation to an alanine at position 235, or a combination thereof.

[0757] The mature ActRIIB-Fc fusion protein sequence is as follows and may optionally be provided with lysine removed from the C-terminus.

1 GRGEAETREC IYYNANWELE RTNQSGLERC EGEQDKRLHC YASWRNSSGT
51 IELVKKGCWL DDFNCYDRQE CVATEENPQV YFCCCEGNFC NERFTHLPEA
101 GGPEVTYEPP PTAPTGGGTH TCPPCPAPEL LGGPSVFLFP PKPKDTLMIS
151 RTPEVTCVVV DVSHEDPEVK FNWYVDGVEV HNAKTKPREE QYNSTYRVVS
201 VLTVLHQDWL NGKEYKCKVS NKALPAPIEK TISKAKGQPR EPQVCTLPPS
251 REEMTKNQVS LSCAVKGFYP SDIAVEWESN GQPENNYKTT PPVLDSDGSF
301 FLVSKLTVDK SRWQQGNVFS CSVMHEALHN HYTQKSLSLS PGK
(SEQ ID NO: 52)

[0758] The ActRIIB(L79E)-Fc and ActRIIB-Fc polypeptides of SEQ ID NO: 50 and SEQ ID NO: 52, respectively, may be co-expressed and purified from a CHO cell line, to give rise to a heteromeric protein complex comprising ActRIIB-Fc:ActRIIB(L79E)-Fc.

[0759] Purification of various ActRIIB-Fc:ActRIIB(L79E)-Fc complexes can be achieved by a series of column chromatography steps, including, for example, three or more of the following, in any order: protein A chromatography, Q sepharose chromatography, phenylsepharose chromatography, size exclusion chromatography, cation exchange chromatography, multimodal chromatography (e.g., with resin containing both electrostatic and hydrophobic ligands), and epitope-based affinity chromatography (e.g., with an antibody or functionally equivalent ligand directed against an epitope of ActRIIB). The purification can be completed with viral filtration and buffer exchange.

### Example 8. Ligand Binding Profile of ActRIIB-Fc:ActRIIB(L79E)-Fc Heteromer

[0760] A Biacore™-based binding assay was used to compare the ligand binding kinetics of an ActRIIB-Fc:ActRIIB(L79E)-Fc heterodimer with those of unmodified ActRIIB-Fc homodimer. Fusion proteins were captured onto the system using an anti-Fc antibody. Ligands were then injected and allowed to flow over the captured receptor protein at 37° C. Results are summarized in the table below, in which ligand off-rates (k_{d}) most indicative of effective ligand traps are denoted in bold.

Ligand binding of ActRIIB-Fc:ActRIIB(L79E)-Fc heterodimer compared to ActRII-Fc homodimer at 37° C.

| Ligand | ActRIIB-Fc homodimer | | | ActRIIB-Fc:ActRIIB(L79E)-Fc heterodimer | | |
|---|---|---|---|---|---|---|
| | kₐ (1/Ms) | k_{d} (1/s) | K_{D} (pM) | kₐ (1/Ms) | k_{d} (1/s) | K_{D} (pM) |
| Activin A | 7.4 x10⁶ | 1.9 x10⁻⁴ | 25 | 8.8 x10⁶ | 1.5 x10⁻³ | 170 |
| Activin B | 8.1 x10⁶ | 6.6 x10⁻⁵ | 8 | 8.3 x10⁶ | 2.1 x10⁻⁴ | 25 |
| GDF3 | 1.4 x10⁶ | 2.2 x10⁻³ | 1500 | 5.8 x10⁵ | 5.9 x10⁻³ | 10000 |
| GDF8 | 3.8 x10⁶ | 2.6 x10⁻⁴ | 70 | 3.4 x10⁶ | 5.0 x10⁻⁴ | 150 |
| GDF11 | 4.1 x10⁷ | 1.7 x10⁻⁴ | 4 | 4.0 x10⁷ | 3.6 x10⁻⁴ | 9 |
| BMP6 | 1.3 x10⁸ | 7.4 x10⁻³ | 56 | 3.3 x10⁸ | 1.8 x10⁻² | 56 |
| BMP9 | 5.0 x10⁶ | 1.3 x10⁻³ | 250 | Transient* | | >2800 |
| BMP10 | 5.1 x10⁷ | 2.0 x10⁻⁴ | 4 | 4.8 x10⁷ | 2.0 x10⁻³ | 42 |

* Indeterminate due to transient nature of interaction

[0761] In this example, a single amino acid substitution in one of two ActRIIB polypeptide chains altered ligand binding selectivity of the Fc-fusion protein relative to unmodified ActRIIB-Fc homodimer. Compared to ActRIIB-Fc homodimer, the ActRIIB(L79E)-Fc heterodimer largely retained high-affinity binding to activin B, GDF8, GDF11, and BMP6 but exhibited approximately ten-fold faster off-rates for activin A and BMP10 and an even greater reduction in the strength of binding to BMP9. Accordingly, a variant ActRIIB-Fc heteromer may be more useful than unmodified ActRIIB-Fc homodimer in certain applications where such selective antagonism is advantageous. Examples include therapeutic applications where it is desirable to retain antagonism of one or more of activin B, GDF8, GDF11, and BMP6, while reducing antagonism of activin A, BMP9, or BMP10.9. Generation of ActRIIB mutants:

[0762] A series of mutations in the extracellular domain of ActRIIB were generated and these mutant proteins were produced as soluble fusion proteins between extracellular ActRIIB and an Fc domain. A co-crystal structure of Activin and extracellular ActRIIB did not show any role for the final (C-terminal) 15 amino acids (referred to as the “tail” herein) of the extracellular domain in ligand binding. This sequence failed to resolve on the crystal structure, suggesting that these residues are present in a flexible loop that did not pack uniformly in the crystal. ThompsonEMBO J. 2003 Apr 1;22(7): 1555-66. This sequence is also poorly conserved between ActRIIB and ActRIIA. Accordingly, these residues were omitted in the basic, or background, ActRIIB-Fc fusion construct. Additionally, in this example position 64 in the background form is occupied by an alanine. Thus, the background ActRIIB-Fc fusion in this example has the sequence (Fc portion underlined)(SEQ ID NO: 54):

SGRGEAETRECIYYNANWELERTNQSGLERCEGEQDKRLHCYAS
WANSSGTIELVKKGCWLDDFNCYDRQECVATEENPQVYFCCCEGNFCNE
RFTHLPEAGGGTHTCPPCPAPELLGGPSVFLFPPKPKDTLMISRTPEVTC
VVVDVSHEDPEVKFNWYVDGVEVHNAKTKPREEQYNSTYRVVSVLTVLHQ
DWLNGKEYKCKVSNKALPVPIEKTISKAKGQPREPQVYTLPPSREEMTKN
QVSLTCLVKGFYPSDIAVEWESNGQPENNYKTTPPVLDSDGSFFLYSKLT
VDKSRWQQGNVFSCSVMHEALHNHYTQKSLSLSPGK

[0763] Surprisingly, as discussed below, the C-terminal tail was found to enhance activin and GDF-11 binding, thus a preferred version of ActRIIB-Fc has a sequence (Fc portion underlined)(SEQ ID NO: 55):

SGRGEAETRECIYYNANWELERTNQSGLERCEGEQDKRLHCYAS
WANSSGTIELVKKGCWLDDFNCYDRQECVATEENPQVYFCCCEGNFCNER
FTHLPEAGGPEVTYEPPPTAPTGGGTHTCPPCPAPELLGGPSVFLFPPKP
KDTLMISRTPEVTCVWDVSHEDPEVKFNWYVDGVEVHNAKTKPREEQYNS
TYRWSVLTVLHQDWLNGKEYKCKVSNKALPVPIEKTISKAKGQPREPQVY
TLPPSREEMTKNQVSLTCLVKGFYPSDIAVEWESNGQPENNYKTTPPVLD
SDGSFFLYSKLTVDKSRWQQGNVFSCSVMHEALHNHYTQKSLSLSPGK

[0764] Various mutations were introduced into the background ActRIIB-Fc protein. Mutations were generated in ActRIIB extracellular domain by PCR mutagenesis. After PCR, fragments were purified thru Qiagen column, digested with SfoI and AgeI and gel purified. These fragments were ligated into expression vector pAID4 such that upon ligation it created fusion chimera with human IgG1. DNAs were isolated. All of the mutants were produced in HEK293T cells by transient transfection. In summary, in a 500 ml spinner, HEK293T cells were set up at 6x10⁵ cells/ml in Freestyle (Invitrogen) media in 250 ml volume and grown overnight. Next day, these cells were treated with DNA:PEI (1:1) complex at 0.5 ug/ml final DNA concentration. After 4 hrs, 250 ml media was added and cells were grown for 7 days. Conditioned media was harvested by spinning down the cells and concentrated.

[0765] All the mutants were purified over protein A column and eluted with low pH (3.0) glycine buffer . After neutralization, these were dialyzed against PBS.

[0766] Mutants were also produced in CHO cells by similar methodology.

[0767] Mutants were tested in binding assays and bioassays described below. Proteins expressed in CHO cells and HEK293 cells were indistinguishable in the binding assays and bioassays.

### Example 9. ActRIIB (F82K)-mFc Treatment Suppresses Kidney Fibrosis and Inflammation and Reduces Kidney Injury

[0768] The effects of variant ActRIIB F82K mFc fusion (ActRIIB (F82K)-mFc), described in Example 5 on kidney disease was assessed in a mouse unilateral ureteral obstruction model. See, e.g., Klahr and Morrissey (2002) Am J Physiol Renal Physiol 283: F861-F875.

[0769] Sixteen C57BL/6 male mice 12 weeks of age underwent left unilateral ureteral ligation twice at the level of the lower pole of kidney. After 3 days, mice were randomized into two groups: i) eight mice were injected subcutaneously with vehicle control, phosphate buffered saline (PBS), at day 3, day 7, day 10, and day 14 after surgery (“UUO/PBS”), and ii) eight mice were injected subcutaneously with ActRIIB (F82K)-mFc at a dose of 10 mg/kg at day 3, day 7, day 10, and day 14 after surgery (“UUO/F82K”). Both groups were sacrificed at day 17 in accordance with the relevant Animal Care Guidelines. Half kidneys from individual animals were collected for histology analysis (H&E, and Masson’s Trichrome stain), from both the UUO kidney and contralateral kidney, and ¼ kidneys were used for RNA extraction (RNeasy Midi Kit, Qiagen, IL).

[0770] Gene expression analysis on UUO kidney samples was performed to assess levels of various genes. QRT-PCR was performed on a CFX Connect™ Real-time PCR detection system (Bio-Rad, CA) to evaluate the expression of various fibrotic genes (Col1a1, Co13al, Fibronectin, PAI-1, and a-SMA), inflammatory genes (Tnfa, and MCP1), cytokines (TGFβ1 and activin A), and kidney injury genes (NGAL). See FIGS. 11A-11J. Treatment of mice with ActRIIB (F82K)-mFc significantly suppressed the expression of fibrotic and inflammatory genes, inhibited the upregulation of TGFβ 1 and Activin A, and reduced kidney injury.

[0771] Together, these data demonstrate that ActRIIB (F82K)-mFc treatment suppresses kidney fibrosis and inflammation and reduces kidney injury. Moreover, these data indicate that other ActRIIB-Fc variants may be useful in the treatment or preventing of kidney disease including, for example, ActRIIB variants that maintain strong binding to activin A, GDF11, and BMP10, but have diminished binding to BMP9.

### Example 10. ActRIIB (F82K)-mFc Treatment Reduces Albuminuria and Improves Renal Function in Alport Mouse Model

[0772] The effects of variant ActRIIB F82K mFc fusion (“ActRIIB (F82K)-mFc”) in Example 5 on kidney disease was assessed in a mouse Alport model (Col4a3-/-). See, e.g., Cosgrove D, et al (1996) Genes Dev 10(23): 2981-92.

[0773] Fourteen Col4a3-/- mice 4 weeks of age were randomized into two groups: i) eight mice were injected subcutaneously with vehicle control, phosphate buffered saline (PBS), twice a week (“Col4a3-Veh”), and a ii) six mice were injected subcutaneously with ActRIIB (F82K)-mFc at a dose of 10 mg/kg twice a week (“Col4a3-F82K”). Urine samples were collected from normal mice (WT), Col4a3-/- mice, and Col4a3-/- mice treated with ActRIIB (F82K)-mFc on the day before treatment starts (4 weeks), day 49 (7 weeks), and day 63 (9 weeks) to measure albumin (mouse albumin ELISA kit, Molecular Innovations, MI) and creatinine (creatinine assay kit, BioAssay Systems, CA). Both groups were sacrificed at day 63 (9 weeks) in accordance with the relevant Animal Care Guidelines. One kidneys from individual animals were collected for histology analysis (H&E, and Masson’s Trichrome stain), and the other kidneys were snap-frozen at -80° C.

[0774] Urinary albumin to creatinine ratio (ACR) was calculated to measure albuminuria. See FIG. 12A. Albuminuria was significantly increased from 4 weeks to 9 weeks in Col4a3-/- mice. Treatment of mice with ActRIIB (F82K)-mFc significantly reduced albuminuria by 38.9% (p<0.05) at 7 weeks, and 45.1% (p<0.001) at 9 weeks in Col4a3-/-mice.

[0775] To evaluate the therapeutic benefits of ActRIIB (F82K)-mFc in the presence of angiotensin-converting enzyme inhibitor (ACEi) in Alport model, ActRIIB (F82K)-mFc was further assessed in Col4a3-/- mice treated with Ramipril. See, e.g., Gross O, et al (2003) Kidney Int. 63(2): 438-46.

[0776] Thirty-one Col4a3-/- mice 4 weeks of age were fed with Ramipril (10 mg/kg/day) in drinking water throughout the study, and randomized into two groups: i) sixteen mice were injected subcutaneously with vehicle control, phosphate buffered saline (PBS), twice a week (Col4a3-ACEi/Veh″), and ii) fifteen mice were injected subcutaneously with ActRIIB (F82K)-mFc at a dose of 10 mg/kg twice a week (“Col4a3-ACEi/F82K”). Urine samples were collected from normal mice (WT), Col4a3-/- mice, and Col4a3-/- mice treated with ActRIIB (F82K)-mFc on the day before treatment starts (4 weeks), day 49 (7 weeks), day 63 (9 weeks), day 84 (12 weeks), day 105 (15 weeks), and day 119 (17 weeks) to measure albumin (mouse albumin ELISA kit, Molecular Innovations, MI) and creatinine (creatinine assay kit, BioAssay Systems, CA). Blood samples were collected from normal mice (WT), Co14a3-/-mice, and Co14a3-/- mice treated with ActRIIB (F82K)-mFc on day 49 (7 weeks), day 63 (9 weeks), day 84 (12 weeks), day 105 (15 weeks), and day 119 (17 weeks) for blood urea nitrogen (BUN) measurement (DRI-CHEM 7000 chemistry analyzer, HESKA, CO). Mice in both groups were euthanized when body weight loss was more than 25% to calculate the survival time in accordance with the relevant Animal Care Guidelines.

[0777] Urinary albumin to creatinine ratio (ACR) was calculated to measure albuminuria. See FIG. 12B. Albuminuria was significantly increased from 4 weeks to 17 weeks in Co14a3-/- mice treated with Ramipril. Treatment of these mice with ActRIIB (F82K)-mFc significantly reduced albuminuria by 76.7%% (p<0.05) at 12 weeks, 59% (p<0.05) at 15 weeks, and 86% (p<0.001) at 17 weeks respectively in Co14a3-/- mice, which was associated with decreased BUN in Co14a3-/- mice (FIG. 12C).

[0778] Moreover, ActRIIB (F82K)-mFc significantly increased life span in Co14a3-/- mice treated with Ramipril (p<0.05), with a median survival time of 141 days in the mice treated with ActRIIB (F82K)-mFc and 119 days in the cohort treated with PBS (FIG. 12D).

[0779] Together, these data demonstrate that ActRIIB (F82K)-mFc treatment reduces albuminuria, improves renal function, and increases life span in Alport mouse model either as a monotherapy or on top of Ramipril treatment. Moreover, these data indicate that ActRIIB (F82K)-mFc and other ActRIIB-mFc variants may be useful in the treatment or preventing of kidney disease including, for example, ActRIIB variants that maintain strong binding to activin A, GDF11, and BMP10, but have diminished binding to BMP9.

### Example 11. ActRIIB (K55A)-mFc, ActRIIB (K55E)-mFc, and ActRIIB (F82I)-mFc Treatment Suppresses Kidney Fibrosis and Inflammation and Reduces Kidney Injury

[0780] The effects of the ActRIIB (K55A)-mFc, ActRIIB (K55E)-mFc, and ActRIIB (F82I)-mFc described in Example 5 on kidney disease was assessed in a mouse unilateral ureteral obstruction model. See, e.g., Klahr and Morrissey (2002) Am J Physiol Renal Physiol 283: F861-F875.

[0781] Thirty-Two C57BL/6 male mice 12 weeks of age underwent left unilateral ureteral ligation twice at the level of the lower pole of kidney. After 3 days, mice were randomized into four groups: i) eight mice were injected subcutaneously with vehicle control, phosphate buffered saline (PBS), at day 3, day 7, day 10, and day 14 after surgery (“UUO/PBS”), ii)eight mice were injected subcutaneously with ActRIIB (K55A)-mFc at a dose of 10 mg/kg at day 3, day 7, day 10, and day 14 after surgery, iii) eight mice were injected subcutaneously with ActRIIB (K55E)-mFc at a dose of 10 mg/kg at day 3, day 7, day 10, and day 14 after surgery, and iv) eight mice were injected subcutaneously with ActRIIB (F82I)-mFc at a dose of 10 mg/kg at day 3, day 7, day 10, and day 14 after surgery. All groups were sacrificed at day 17 in accordance with the relevant Animal Care Guidelines. Half kidneys from individual animals were collected for histology analysis (H&E, and Masson’s Trichrome stain), from both the UUO kidney and contralateral kidney, and ¼ kidneys were used for RNA extraction (RNeasy Midi Kit, Qiagen, IL).

[0782] Gene expression analysis on UUO kidney samples was performed to assess levels of various genes. QRT-PCR was performed on a CFX Connect™ Real-time PCR detection system (Bio-Rad, CA) to evaluate the expression of various fibrotic genes (Col1a1, Co13a1, Fibronectin, PAI-1, and a-SMA), inflammatory genes (Tnfa, and MCP1), cytokines (TGFβ1 and activin A), and kidney injury genes (NGAL). See FIGS. 13A-J.

[0783] Treatment of mice with ActRIIB (K55A)-mFc significantly suppressed the expression of fibrotic and inflammatory genes, inhibited the upregulation of TGFβ 1 and Activin A, and reduced kidney injury. Treatment of mice with ActRIIB (K55E)-mFc significantly suppressed the expression of PAI-1 and a-SMA, but not Col1a1, Co13a1,and Fibronectin. In addition, treatment of mice with ActRIIB (K55E)-mFc did not significantly suppress inflammatory genes expression, nor reduce kidney injury. Treatment of mice with ActRIIB (F82I)-mFc significantly suppressed the expression of PAI-1 and a-SMA, but not Col1a1, Co13a1,and Fibronectin. In addition, treatment of mice with ActRIIB (F82I)-mFc significantly inhibited the upregulation of TGFβ 1 and Activin A, and reduced kidney injury. However, ActRIIB (F82I)-mFc did not significantly suppress inflammatory genes expression.

[0784] Together, these data demonstrate that ActRIIB (K55A)-mFc is more potent than ActRIIB (K55E)-mFc and ActRIIB (F82I)-mFc to suppress kidney fibrosis and inflammation and reduce kidney injury in a UUO model.

### Example 12: Generation of Variant ActRIIB-Fc Proteins

[0785] Applicants generated a series of mutations (sequence variations) in the extracellular domain of ActRIIB and produced these variant polypeptides as soluble homodimeric fusion proteins comprising a variant ActRIIB extracellular domain and an Fc domain joined by an optional linker. The background ActRIIB-Fc fusion was ActRIIB-G1Fc as shown in SEQ ID NO: 5.

[0786] Various substitution mutations were introduced into the background ActRIIB-Fc protein. Based on the data presented in Example 1, it is expected that these constructs, if expressed with a TPA leader, may lack the N-terminal serine. Mutations were generated in the ActRIIB extracellular domain by gene synthesis at Twist Bioscience or Genscript. Fragments were ligated into the NheI and AgeI sites of the . expression vector pAID4 (see WO2006/012627) such that upon ligation it created fusion chimera with human IgG1 Fc domain. Upon transformation into E. coli DH5 alpha, colonies were picked and DNA was isolated. All mutants were sequence verified.

[0787] The amino acid sequence of unprocessed ActRIIB(N35E)-G1Fc is shown below (SEQ ID NO: 366). The signal sequence and linker sequences are indicated by solid underline, and the N35E substitution is indicated by double underline. The amino acid sequence of SEQ ID NO: 366 may optionally be provided with the lysine removed from the C-terminus. The G1Fc region may also comprise a mutation to an alanine at position 234 or a mutation to an alanine at position 235, or a combination thereof.

1 MDAMKRGLCC VLLLCGAVFV SPGASGRGEA ETRECIYYNA EWELERTNQS
51 GLERCEGEQD KRLHCYASWR NSSGTIELVK KGCWLDDFNC YDRQECVATE
101 ENPQVYFCCC EGNFCNERFT HLPEAGGPEV TYEPPPTAPT GGGTHTCPPC
151 PAPELLGGPS VFLFPPKPKD TLMISRTPEV TCVVVDVSHE DPEVKFNWYV
201 DGVEVHNAKT KPREEQYNST YRVVSVLTVL HQDWLNGKEY KCKVSNKALP
251 APIEKTISKA KGQPREPQVY TLPPSREEMT KNQVSLTCLV KGFYPSDIAV
301 EWESNGQPEN NYKTTPPVLD SDGSFFLYSK LTVDKSRWQQ GNVFSCSVMH
351 EALHNHYTQK SLSLSPGK (SEQ ID NO: 366)

[0788] This ActRIIB(N35E)-G1Fc fusion polypeptide is encoded by the following nucleic acid sequence (SEQ ID NO: 367):

1 ATGGATGCAA TGAAGAGAGG GCTCTGCTGT GTGCTGCTGC TGTGTGGAGC
51 AGTCTTCGTT TCGCCCGGCG CCTCTGGGCG TGGGGAGGCT GAGACACGGG
101 AGTGCATCTA CTACAACGCC GAGTGGGAGC TGGAGCGCAC CAACCAGAGC
151 GGCCTGGAGC GCTGCGAAGG CGAGCAGGAC AAGCGGCTGC ACTGCTACGC
201 CTCCTGGCGC AACAGCTCTG GCACCATCGA GCTCGTGAAG AAGGGCTGCT
251 GGCTAGATGA CTTCAACTGC TACGATAGGC AGGAGTGTGT GGCCACTGAG
301 GAGAACCCCC AGGTGTACTT CTGCTGCTGT GAAGGCAACT TCTGCAACGA
351 GCGCTTCACT CATTTGCCAG AGGCTGGGGG CCCGGAAGTC ACGTACGAGC
401 CACCCCCGAC AGCCCCCACC GGTGGTGGAA CTCACACATG CCCACCGTGC
451 CCAGCACCTG AACTCCTGGG GGGACCGTCA GTCTTCCTCT TCCCCCCAAA
501 ACCCAAGGAC ACCCTCATGA TCTCCCGGAC CCCTGAGGTC ACATGCGTGG
551 TGGTGGACGT GAGCCACGAA GACCCTGAGG TCAAGTTCAA CTGGTACGTG
601 GACGGCGTGG AGGTGCATAA TGCCAAGACA AAGCCGCGGG AGGAGCAGTA
651 CAACAGCACG TACCGTGTGG TCAGCGTCCT CACCGTCCTG CACCAGGACT
701 GGCTGAATGG CAAGGAGTAC AAGTGCAAGG TCTCCAACAA AGCCCTCCCA
751 GCCCCCATCG AGAAAACCAT CTCCAAAGCC AAAGGGCAGC CCCGAGAACC
801 ACAGGTGTAC ACCCTGCCCC CATCCCGGGA GGAGATGACC AAGAACCAGG
851 TCAGCCTGAC CTGCCTGGTC AAAGGCTTCT ATCCCAGCGA CATCGCCGTG
901 GAGTGGGAGA GCAATGGGCA GCCGGAGAAC AACTACAAGA CCACGCCTCC
951 CGTGCTGGAC TCCGACGGCT CCTTCTTCCT CTATAGCAAG CTCACCGTGG
1001 ACAAGAGCAG GTGGCAGCAG GGGAACGTCT TCTCATGCTC CGTGATGCAT
1051 GAGGCTCTGC ACAACCACTA CACGCAGAAG AGCCTCTCCC TGTCTCCGGG
1101 TAAA (SEQ ID NO: 367)

[0789] A mature ActRIIB(N35E)-G1Fc fusion polypeptide (SEQ ID NO: 368) is as follows and may optionally be provided with the lysine removed from the C-terminus. The G1Fc region may also comprise a mutation to an alanine at position 234 or a mutation to an alanine at position 235, or a combination thereof.

1 GRGEAETREC IYYNAEWELE RTNQSGLERC EGEQDKRLHC YASWRNSSGT
51 IELVKKGCWL DDFNCYDRQE CVATEENPQV YFCCCEGNFC NERFTHLPEA
101 GGPEVTYEPP PTAPTGGGTH TCPPCPAPEL LGGPSVFLFP PKPKDTLMIS
151 RTPEVTCVVV DVSHEDPEVK FNWYVDGVEV HNAKTKPREE QYNSTYRVVS
201 VLTVLHQDWL NGKEYKCKVS NKALPAPIEK TISKAKGQPR EPQVYTLPPS
251 REEMTKNQVS LTCLVKGFYP SDIAVEWESN GQPENNYKTT PPVLDSDGSF
301 FLYSKLTVDK SRWQQGNVFS CSVMHEALHN HYTQKSLSLS PGK
(SEQ ID NO: 368)

[0790] The amino acid sequence of unprocessed ActRIIB(E52N)-G1Fc is shown below (SEQ ID NO: 369). The signal sequence and linker sequences are indicated by solid underline, and the E52N substitution is indicated by double underline. The amino acid sequence of SEQ ID NO: 369 may optionally be provided with the lysine removed from the C-terminus. The G1Fc region may also comprise a mutation to an alanine at position 234 or a mutation to an alanine at position 235, or a combination thereof.

1 MDAMKRGLCC VLLLCGAVFV SPGASGRGEA ETRECIYYNA NWELERTNQS
51 GLERCEGNQD KRLHCYASWR NSSGTIELVK KGCWLDDFNC YDRQECVATE
101 ENPQVYFCCC EGNFCNERFT HLPEAGGPEV TYEPPPTAPT GGGTHTCPPC
151 PAPELLGGPS VFLFPPKPKD TLMISRTPEV TCVVVDVSHE DPEVKFNWYV
201 DGVEVHNAKT KPREEQYNST YRVVSVLTVL HQDWLNGKEY KCKVSNKALP
251 APIEKTISKA KGQPREPQVY TLPPSREEMT KNQVSLTCLV KGFYPSDIAV
301 EWESNGQPEN NYKTTPPVLD SDGSFFLYSK LTVDKSRWQQ GNVFSCSVMH
351 EALHNHYTQK SLSLSPGK (SEQ ID NO: 369)

[0791] This ActRIIB(E52N)-G1Fc fusion polypeptide is encoded by the following nucleic acid sequence (SEQ ID NO: 370):

1 ATGGATGCAA TGAAGAGAGG GCTCTGCTGT GTGCTGCTGC TGTGTGGAGC
51 AGTCTTCGTT TCGCCCGGCG CCTCTGGGCG TGGGGAGGCT GAGACACGGG
101 AGTGCATCTA CTACAACGCC AACTGGGAGC TGGAGCGCAC CAACCAGAGC
151 GGCCTGGAGC GCTGCGAAGG CAACCAGGAC AAGCGGCTGC ACTGCTACGC
201 CTCCTGGCGC AACAGCTCTG GCACCATCGA GCTCGTGAAG AAGGGCTGCT
251 GGCTAGATGA CTTCAACTGC TACGATAGGC AGGAGTGTGT GGCCACTGAG
301 GAGAACCCCC AGGTGTACTT CTGCTGCTGT GAAGGCAACT TCTGCAACGA
351 GCGCTTCACT CATTTGCCAG AGGCTGGGGG CCCGGAAGTC ACGTACGAGC
401 CACCCCCGAC AGCCCCCACC GGTGGTGGAA CTCACACATG CCCACCGTGC
451 CCAGCACCTG AACTCCTGGG GGGACCGTCA GTCTTCCTCT TCCCCCCAAA
501 ACCCAAGGAC ACCCTCATGA TCTCCCGGAC CCCTGAGGTC ACATGCGTGG
551 TGGTGGACGT GAGCCACGAA GACCCTGAGG TCAAGTTCAA CTGGTACGTG
601 GACGGCGTGG AGGTGCATAA TGCCAAGACA AAGCCGCGGG AGGAGCAGTA
651 CAACAGCACG TACCGTGTGG TCAGCGTCCT CACCGTCCTG CACCAGGACT
701 GGCTGAATGG CAAGGAGTAC AAGTGCAAGG TCTCCAACAA AGCCCTCCCA
751 GCCCCCATCG AGAAAACCAT CTCCAAAGCC AAAGGGCAGC CCCGAGAACC
801 ACAGGTGTAC ACCCTGCCCC CATCCCGGGA GGAGATGACC AAGAACCAGG
851 TCAGCCTGAC CTGCCTGGTC AAAGGCTTCT ATCCCAGCGA CATCGCCGTG
901 GAGTGGGAGA GCAATGGGCA GCCGGAGAAC AACTACAAGA CCACGCCTCC
951 CGTGCTGGAC TCCGACGGCT CCTTCTTCCT CTATAGCAAG CTCACCGTGG
1001 ACAAGAGCAG GTGGCAGCAG GGGAACGTCT TCTCATGCTC CGTGATGCAT
1051 GAGGCTCTGC ACAACCACTA CACGCAGAAG AGCCTCTCCC TGTCTCCGGG
1101 TAAA (SEQ ID NO: 370)

[0792] A mature ActRIIB(E52N)-G1Fc fusion polypeptide (SEQ ID NO: 371) is as follows and may optionally be provided with the lysine removed from the C-terminus. The G1Fc region may also comprise a mutation to an alanine at position 234 or a mutation to an alanine at position 235, or a combination thereof.

1 GRGEAETREC IYYNANWELE RTNQSGLERC EGNQDKRLHC YASWRNSSGT
51 IELVKKGCWL DDFNCYDRQE CVATEENPQV YFCCCEGNFC NERFTHLPEA
101 GGPEVTYEPP PTAPTGGGTH TCPPCPAPEL LGGPSVFLFP PKPKDTLMIS
151 RTPEVTCVVV DVSHEDPEVK FNWYVDGVEV HNAKTKPREE QYNSTYRVVS
201 VLTVLHQDWL NGKEYKCKVS NKALPAPIEK TISKAKGQPR EPQVYTLPPS
251 REEMTKNQVS LTCLVKGFYP SDIAVEWESN GQPENNYKTT PPVLDSDGSF
301 FLYSKLTVDK SRWQQGNVFS CSVMHEALHN HYTQKSLSLS PGK
(SEQ ID NO: 371)

[0793] The amino acid sequence of unprocessed ActRIIB(Y60D)-G1Fc is shown below (SEQ ID NO: 372). The signal sequence and linker sequences are indicated by solid underline, and the Y60D substitution is indicated by double underline. The amino acid sequence of SEQ ID NO: 372 may optionally be provided with the lysine removed from the C-terminus. The G1Fc region may also comprise a mutation to an alanine at position 234 or a mutation to an alanine at position 235, or a combination thereof.

1 MDAMKRGLCC VLLLCGAVFV SPGASGRGEA ETRECIYYNA NWELERTNQS
51 GLERCEGEQD KRLHCDASWR NSSGTIELVK KGCWLDDFNC YDRQECVATE
101 ENPQVYFCCC EGNFCNERFT HLPEAGGPEV TYEPPPTAPT GGGTHTCPPC
151 PAPELLGGPS VFLFPPKPKD TLMISRTPEV TCVVVDVSHE DPEVKFNWYV
201 DGVEVHNAKT KPREEQYNST YRVVSVLTVL HQDWLNGKEY KCKVSNKALP
251 APIEKTISKA KGQPREPQVY TLPPSREEMT KNQVSLTCLV KGFYPSDIAV
301 EWESNGQPEN NYKTTPPVLD SDGSFFLYSK LTVDKSRWQQ GNVFSCSVMH
351 EALHNHYTQK SLSLSPGK (SEQ ID NO: 372)

[0794] This ActRIIB(Y60D)-G1Fc fusion polypeptide is encoded by the following nucleic acid sequence (SEQ ID NO: 373):

1 ATGGATGCAA TGAAGAGAGG GCTCTGCTGT GTGCTGCTGC TGTGTGGAGC
51 AGTCTTCGTT TCGCCCGGCG CCTCTGGGCG TGGGGAGGCT GAGACACGGG
101 AGTGCATCTA CTACAACGCC AACTGGGAGC TGGAGCGCAC CAACCAGAGC
151 GGCCTGGAGC GCTGCGAAGG CGAGCAGGAC AAGCGGCTGC ACTGCGACGC
201 CTCCTGGCGC AACAGCTCTG GCACCATCGA GCTCGTGAAG AAGGGCTGCT
251 GGCTAGATGA CTTTAACTGC TACGATAGGC AGGAGTGTGT GGCCACTGAG
301 GAGAACCCCC AGGTGTACTT CTGCTGCTGT GAAGGCAACT TCTGCAACGA
351 GCGCTTCACT CATTTGCCAG AGGCTGGGGG CCCGGAAGTC ACGTACGAGC
401 CACCCCCGAC AGCCCCCACC GGTGGTGGAA CTCACACATG CCCACCGTGC
451 CCAGCACCTG AACTCCTGGG GGGACCGTCA GTCTTCCTCT TCCCCCCAAA
501 ACCCAAGGAC ACCCTCATGA TCTCCCGGAC CCCTGAGGTC ACATGCGTGG
551 TGGTGGACGT GAGCCACGAA GACCCTGAGG TCAAGTTCAA CTGGTACGTG
601 GACGGCGTGG AGGTGCATAA TGCCAAGACA AAGCCGCGGG AGGAGCAGTA
651 CAACAGCACG TACCGTGTGG TCAGCGTCCT CACCGTCCTG CACCAGGACT
701 GGCTGAATGG CAAGGAGTAC AAGTGCAAGG TCTCCAACAA AGCCCTCCCA
751 GCCCCCATCG AGAAAACCAT CTCCAAAGCC AAAGGGCAGC CCCGAGAACC
801 ACAGGTGTAC ACCCTGCCCC CATCCCGGGA GGAGATGACC AAGAACCAGG
851 TCAGCCTGAC CTGCCTGGTC AAAGGCTTCT ATCCCAGCGA CATCGCCGTG
901 GAGTGGGAGA GCAATGGGCA GCCGGAGAAC AACTACAAGA CCACGCCTCC
951 CGTGCTGGAC TCCGACGGCT CCTTCTTCCT CTATAGCAAG CTCACCGTGG
1001 ACAAGAGCAG GTGGCAGCAG GGGAACGTCT TCTCATGCTC CGTGATGCAT
1051 GAGGCTCTGC ACAACCACTA CACGCAGAAG AGCCTCTCCC TGTCTCCGGG
1101 TAAA (SEQ ID NO: 373)

[0795] A mature ActRIIB(Y60D)-G1Fc fusion polypeptide (SEQ ID NO: 374) is as follows and may optionally be provided with the lysine removed from the C-terminus. The G1Fc region may also comprise a mutation to an alanine at position 234 or a mutation to an alanine at position 235, or a combination thereof.

1 GRGEAETREC IYYNANWELE RTNQSGLERC EGEQDKRLHC DASWRNSSGT
51 IELVKKGCWL DDFNCYDRQE CVATEENPQV YFCCCEGNFC NERFTHLPEA
101 GGPEVTYEPP PTAPTGGGTH TCPPCPAPEL LGGPSVFLFP PKPKDTLMIS
151 RTPEVTCVVV DVSHEDPEVK FNWYVDGVEV HNAKTKPREE QYNSTYRVVS
201 VLTVLHQDWL NGKEYKCKVS NKALPAPIEK TISKAKGQPR EPQVYTLPPS
251 REEMTKNQVS LTCLVKGFYP SDIAVEWESN GQPENNYKTT PPVLDSDGSF
301 FLYSKLTVDK SRWQQGNVFS CSVMHEALHN HYTQKSLSLS PGK
(SEQ ID NO: 374)

[0796] The amino acid sequence of unprocessed ActRIIB(G68R)-G1Fc is shown below (SEQ ID NO: 375). The signal sequence and linker sequences are indicated by solid underline, and the G68R substitution is indicated by double underline. The amino acid sequence of SEQ ID NO: 375 may optionally be provided with the lysine removed from the C-terminus. The G1Fc region may also comprise a mutation to an alanine at position 234 or a mutation to an alanine at position 235, or a combination thereof.

1 MDAMKRGLCC VLLLCGAVFV SPGASGRGEA ETRECIYYNA NWELERTNQS
51 GLERCEGEQD KRLHCYASWR NSSRTIELVK KGCWLDDFNC YDRQECVATE
101 ENPQVYFCCC EGNFCNERFT HLPEAGGPEV TYEPPPTAPT GGGTHTCPPC
151 PAPELLGGPS VFLFPPKPKD TLMISRTPEV TCVVVDVSHE DPEVKFNWYV
201 DGVEVHNAKT KPREEQYNST YRVVSVLTVL HQDWLNGKEY KCKVSNKALP
251 APIEKTISKA KGQPREPQVY TLPPSREEMT KNQVSLTCLV KGFYPSDIAV
301 EWESNGQPEN NYKTTPPVLD SDGSFFLYSK LTVDKSRWQQ GNVFSCSVMH
351 EALHNHYTQK SLSLSPGK (SEQ ID NO: 375)

[0797] This ActRIIB(G68R)-G1Fc fusion polypeptide is encoded by the following nucleic acid sequence (SEQ ID NO: 376):

1 ATGGATGCAA TGAAGAGAGG GCTCTGCTGT GTGCTGCTGC TGTGTGGAGC
51 AGTCTTCGTT TCGCCCGGCG CCTCTGGGCG TGGGGAGGCT GAGACACGGG
101 AGTGCATCTA CTACAACGCC AACTGGGAGC TGGAGCGCAC CAACCAGAGC
151 GGCCTGGAGC GCTGCGAAGG CGAGCAGGAC AAGCGGCTGC ACTGCTACGC
201 CTCCTGGCGC AACAGCTCTA GGACCATCGA GCTCGTGAAG AAGGGCTGCT
251 GGCTAGATGA CTTTAACTGC TACGATAGGC AGGAGTGTGT GGCCACTGAG
301 GAGAACCCCC AGGTGTACTT CTGCTGCTGT GAAGGCAACT TCTGCAACGA
351 GCGCTTCACT CATTTGCCAG AGGCTGGGGG CCCGGAAGTC ACGTACGAGC
401 CACCCCCGAC AGCCCCCACC GGTGGTGGAA CTCACACATG CCCACCGTGC
451 CCAGCACCTG AACTCCTGGG GGGACCGTCA GTCTTCCTCT TCCCCCCAAA
501 ACCCAAGGAC ACCCTCATGA TCTCCCGGAC CCCTGAGGTC ACATGCGTGG
551 TGGTGGACGT GAGCCACGAA GACCCTGAGG TCAAGTTCAA CTGGTACGTG
601 GACGGCGTGG AGGTGCATAA TGCCAAGACA AAGCCGCGGG AGGAGCAGTA
651 CAACAGCACG TACCGTGTGG TCAGCGTCCT CACCGTCCTG CACCAGGACT
701 GGCTGAATGG CAAGGAGTAC AAGTGCAAGG TCTCCAACAA AGCCCTCCCA
751 GCCCCCATCG AGAAAACCAT CTCCAAAGCC AAAGGGCAGC CCCGAGAACC
801 ACAGGTGTAC ACCCTGCCCC CATCCCGGGA GGAGATGACC AAGAACCAGG
851 TCAGCCTGAC CTGCCTGGTC AAAGGCTTCT ATCCCAGCGA CATCGCCGTG
901 GAGTGGGAGA GCAATGGGCA GCCGGAGAAC AACTACAAGA CCACGCCTCC
951 CGTGCTGGAC TCCGACGGCT CCTTCTTCCT CTATAGCAAG CTCACCGTGG
1001 ACAAGAGCAG GTGGCAGCAG GGGAACGTCT TCTCATGCTC CGTGATGCAT
1051 GAGGCTCTGC ACAACCACTA CACGCAGAAG AGCCTCTCCC TGTCTCCGGG
1101 TAAA (SEQ ID NO: 376)

[0798] A mature ActRIIB(G68R)-G1Fc fusion polypeptide (SEQ ID NO: 377) is as follows and may optionally be provided with the lysine removed from the C-terminus. The G1Fc region may also comprise a mutation to an alanine at position 234 or a mutation to an alanine at position 235, or a combination thereof.

1 GRGEAETREC IYYNANWELE RTNQSGLERC EGEQDKRLHC YASWRNSSRT
51 IELVKKGCWL DDFNCYDRQE CVATEENPQV YFCCCEGNFC NERFTHLPEA
101 GGPEVTYEPP PTAPTGGGTH TCPPCPAPEL LGGPSVFLFP PKPKDTLMIS
151 RTPEVTCVVV DVSHEDPEVK FNWYVDGVEV HNAKTKPREE QYNSTYRVVS
201 VLTVLHQDWL NGKEYKCKVS NKALPAPIEK TISKAKGQPR EPQVYTLPPS
251 REEMTKNQVS LTCLVKGFYP SDIAVEWESN GQPENNYKTT PPVLDSDGSF
301 FLYSKLTVDK SRWQQGNVFS CSVMHEALHN HYTQKSLSLS PGK
(SEQ ID NO: 377)

[0799] The amino acid sequence of unprocessed ActRIIB(K74E)-G1Fc is shown below (SEQ ID NO: 378). The signal sequence and linker sequences are indicated by solid underline, and the K74E substitution is indicated by double underline. The amino acid sequence of SEQ ID NO: 378 may optionally be provided with the lysine removed from the C-terminus. The G1Fc region may also comprise a mutation to an alanine at position 234 or a mutation to an alanine at position 235, or a combination thereof.

1 MDAMKRGLCC VLLLCGAVFV SPGASGRGEA ETRECIYYNA NWELERTNQS
51 GLERCEGEQD KRLHCYASWR NSSGTIELVE KGCWLDDFNC YDRQECVATE
101 ENPQVYFCCC EGNFCNERFT HLPEAGGPEV TYEPPPTAPT GGGTHTCPPC
151 PAPELLGGPS VFLFPPKPKD TLMISRTPEV TCVVVDVSHE DPEVKFNWYV
201 DGVEVHNAKT KPREEQYNST YRVVSVLTVL HQDWLNGKEY KCKVSNKALP
251 APIEKTISKA KGQPREPQVY TLPPSREEMT KNQVSLTCLV KGFYPSDIAV
301 EWESNGQPEN NYKTTPPVLD SDGSFFLYSK LTVDKSRWQQ GNVFSCSVMH
351 EALHNHYTQK SLSLSPGK (SEQ ID NO: 378)

[0800] This ActRIIB(K74E)-G1Fc fusion polypeptide is encoded by the following nucleic acid sequence (SEQ ID NO: 379):

1 ATGGATGCAA TGAAGAGAGG GCTCTGCTGT GTGCTGCTGC TGTGTGGAGC
51 AGTCTTCGTT TCGCCCGGCG CCTCTGGGCG TGGGGAGGCT GAGACACGGG
101 AGTGCATCTA CTACAACGCC AACTGGGAGC TGGAGCGCAC CAACCAGAGC
151 GGCCTGGAGC GCTGCGAAGG CGAGCAGGAC AAGCGGCTGC ACTGCTACGC
201 CTCCTGGCGC AACAGCTCTG GCACCATCGA GCTCGTGGAG AAGGGCTGCT
251 GGCTAGATGA CTTTAACTGC TACGATAGGC AGGAGTGTGT GGCCACTGAG
301 GAGAACCCCC AGGTGTACTT CTGCTGCTGT GAAGGCAACT TCTGCAACGA
351 GCGCTTCACT CATTTGCCAG AGGCTGGGGG CCCGGAAGTC ACGTACGAGC
401 CACCCCCGAC AGCCCCCACC GGTGGTGGAA CTCACACATG CCCACCGTGC
451 CCAGCACCTG AACTCCTGGG GGGACCGTCA GTCTTCCTCT TCCCCCCAAA
501 ACCCAAGGAC ACCCTCATGA TCTCCCGGAC CCCTGAGGTC ACATGCGTGG
551 TGGTGGACGT GAGCCACGAA GACCCTGAGG TCAAGTTCAA CTGGTACGTG
601 GACGGCGTGG AGGTGCATAA TGCCAAGACA AAGCCGCGGG AGGAGCAGTA
651 CAACAGCACG TACCGTGTGG TCAGCGTCCT CACCGTCCTG CACCAGGACT
701 GGCTGAATGG CAAGGAGTAC AAGTGCAAGG TCTCCAACAA AGCCCTCCCA
751 GCCCCCATCG AGAAAACCAT CTCCAAAGCC AAAGGGCAGC CCCGAGAACC
801 ACAGGTGTAC ACCCTGCCCC CATCCCGGGA GGAGATGACC AAGAACCAGG
851 TCAGCCTGAC CTGCCTGGTC AAAGGCTTCT ATCCCAGCGA CATCGCCGTG
901 GAGTGGGAGA GCAATGGGCA GCCGGAGAAC AACTACAAGA CCACGCCTCC
951 CGTGCTGGAC TCCGACGGCT CCTTCTTCCT CTATAGCAAG CTCACCGTGG
1001 ACAAGAGCAG GTGGCAGCAG GGGAACGTCT TCTCATGCTC CGTGATGCAT
1051 GAGGCTCTGC ACAACCACTA CACGCAGAAG AGCCTCTCCC TGTCTCCGGG
1101 TAAA (SEQ ID NO: 379)

[0801] A mature ActRIIB(K74E)-G1Fc fusion polypeptide (SEQ ID NO: 380) is as follows and may optionally be provided with the lysine removed from the C-terminus. The G1Fc region may also comprise a mutation to an alanine at position 234 or a mutation to an alanine at position 235, or a combination thereof.

1 GRGEAETREC IYYNANWELE RTNQSGLERC EGEQDKRLHC YASWRNSSGT
51 IELVEKGCWL DDFNCYDRQE CVATEENPQV YFCCCEGNFC NERFTHLPEA
101 GGPEVTYEPP PTAPTGGGTH TCPPCPAPEL LGGPSVFLFP PKPKDTLMIS
151 RTPEVTCVVV DVSHEDPEVK FNWYVDGVEV HNAKTKPREE QYNSTYRVVS
201 VLTVLHQDWL NGKEYKCKVS NKALPAPIEK TISKAKGQPR EPQVYTLPPS
251 REEMTKNQVS LTCLVKGFYP SDIAVEWESN GQPENNYKTT PPVLDSDGSF
301 FLYSKLTVDK SRWQQGNVFS CSVMHEALHN HYTQKSLSLS PGK
(SEQ ID NO: 380)

[0802] The amino acid sequence of unprocessed ActRIIB(W78Y)-G1Fc is shown below (SEQ ID NO: 381). The signal sequence and linker sequences are indicated by solid underline, and the W78Y substitution is indicated by double underline. The amino acid sequence of SEQ ID NO: 381 may optionally be provided with the lysine removed from the C-terminus. The G1Fc region may also comprise a mutation to an alanine at position 234 or a mutation to an alanine at position 235, or a combination thereof.

1 MDAMKRGLCC VLLLCGAVFV SPGASGRGEA ETRECIYYNA NWELERTNQS
51 GLERCEGEQD KRLHCYASWR NSSGTIELVK KGCYLDDFNC YDRQECVATE
101 ENPQVYFCCC EGNFCNERFT HLPEAGGPEV TYEPPPTAPT GGGTHTCPPC
151 PAPELLGGPS VFLFPPKPKD TLMISRTPEV TCVVVDVSHE DPEVKFNWYV
201 DGVEVHNAKT KPREEQYNST YRVVSVLTVL HQDWLNGKEY KCKVSNKALP
251 APIEKTISKA KGQPREPQVY TLPPSREEMT KNQVSLTCLV KGFYPSDIAV
301 EWESNGQPEN NYKTTPPVLD SDGSFFLYSK LTVDKSRWQQ GNVFSCSVMH
351 EALHNHYTQK SLSLSPGK (SEQ ID NO: 381)

[0803] This ActRIIB(W78Y)-G1Fc fusion polypeptide is encoded by the following nucleic acid sequence (SEQ ID NO: 382):

1 ATGGATGCAA TGAAGAGAGG GCTCTGCTGT GTGCTGCTGC TGTGTGGAGC
51 AGTCTTCGTT TCGCCCGGCG CCTCTGGGCG TGGGGAGGCT GAGACACGGG
101 AGTGCATCTA CTACAACGCC AACTGGGAGC TGGAGCGCAC CAACCAGAGC
151 GGCCTGGAGC GCTGCGAAGG CGAGCAGGAC AAGCGGCTGC ACTGCTACGC
201 CTCCTGGCGC AACAGCTCTG GCACCATCGA GCTCGTGAAG AAGGGCTGCT
251 ACCTAGATGA CTTCAACTGC TACGATAGGC AGGAGTGTGT GGCCACTGAG
301 GAGAACCCCC AGGTGTACTT CTGCTGCTGT GAAGGCAACT TCTGCAACGA
351 GCGCTTCACT CATTTGCCAG AGGCTGGGGG CCCGGAAGTC ACGTACGAGC
401 CACCCCCGAC AGCCCCCACC GGTGGTGGAA CTCACACATG CCCACCGTGC
451 CCAGCACCTG AACTCCTGGG GGGACCGTCA GTCTTCCTCT TCCCCCCAAA
501 ACCCAAGGAC ACCCTCATGA TCTCCCGGAC CCCTGAGGTC ACATGCGTGG
551 TGGTGGACGT GAGCCACGAA GACCCTGAGG TCAAGTTCAA CTGGTACGTG
601 GACGGCGTGG AGGTGCATAA TGCCAAGACA AAGCCGCGGG AGGAGCAGTA
651 CAACAGCACG TACCGTGTGG TCAGCGTCCT CACCGTCCTG CACCAGGACT
701 GGCTGAATGG CAAGGAGTAC AAGTGCAAGG TCTCCAACAA AGCCCTCCCA
751 GCCCCCATCG AGAAAACCAT CTCCAAAGCC AAAGGGCAGC CCCGAGAACC
801 ACAGGTGTAC ACCCTGCCCC CATCCCGGGA GGAGATGACC AAGAACCAGG
851 TCAGCCTGAC CTGCCTGGTC AAAGGCTTCT ATCCCAGCGA CATCGCCGTG
901 GAGTGGGAGA GCAATGGGCA GCCGGAGAAC AACTACAAGA CCACGCCTCC
951 CGTGCTGGAC TCCGACGGCT CCTTCTTCCT CTATAGCAAG CTCACCGTGG
1001 ACAAGAGCAG GTGGCAGCAG GGGAACGTCT TCTCATGCTC CGTGATGCAT
1051 GAGGCTCTGC ACAACCACTA CACGCAGAAG AGCCTCTCCC TGTCTCCGGG
1101 TAAA (SEQ ID NO: 382)

[0804] A mature ActRIIB(W78Y)-G1Fc fusion polypeptide (SEQ ID NO: 383) is as follows and may optionally be provided with the lysine removed from the C-terminus. The G1Fc region may also comprise a mutation to an alanine at position 234 or a mutation to an alanine at position 235, or a combination thereof.

1 GRGEAETREC IYYNANWELE RTNQSGLERC EGEQDKRLHC YASWRNSSGT
51 IELVKKGCYL DDFNCYDRQE CVATEENPQV YFCCCEGNFC NERFTHLPEA
101 GGPEVTYEPP PTAPTGGGTH TCPPCPAPEL LGGPSVFLFP PKPKDTLMIS
151 RTPEVTCVVV DVSHEDPEVK FNWYVDGVEV HNAKTKPREE QYNSTYRVVS
201 VLTVLHQDWL NGKEYKCKVS NKALPAPIEK TISKAKGQPR EPQVYTLPPS
251 REEMTKNQVS LTCLVKGFYP SDIAVEWESN GQPENNYKTT PPVLDSDGSF
301 FLYSKLTVDK SRWQQGNVFS CSVMHEALHN HYTQKSLSLS PGK
(SEQ ID NO: 383)

[0805] The amino acid sequence of unprocessed ActRIIB (L79A)-G1Fc is shown below (SEQ ID NO: 384). The signal sequence and linker sequences are indicated by solid underline, and the L79A substitution is indicated by double underline. The amino acid sequence of SEQ ID NO: 384 may optionally be provided with the lysine removed from the C-terminus. The G1Fc region may also comprise a mutation to an alanine at position 234 or a mutation to an alanine at position 235, or a combination thereof.

1 MDAMKRGLCC VLLLCGAVFV SPGASGRGEA ETRECIYYNA NWELERTNQS
51 GLERCEGEQD KRLHCYASWR NSSGTIELVK KGCWADDFNC YDRQECVATE
101 ENPQVYFCCC EGNFCNERFT HLPEAGGPEV TYEPPPTAPT GGGTHTCPPC
151 PAPELLGGPS VFLFPPKPKD TLMISRTPEV TCVVVDVSHE DPEVKFNWYV
201 DGVEVHNAKT KPREEQYNST YRVVSVLTVL HQDWLNGKEY KCKVSNKALP
251 APIEKTISKA KGQPREPQVY TLPPSREEMT KNQVSLTCLV KGFYPSDIAV
301 EWESNGQPEN NYKTTPPVLD SDGSFFLYSK LTVDKSRWQQ GNVFSCSVMH
351 EALHNHYTQK SLSLSPGK (SEQ ID NO: 384)

[0806] This ActRIIB (L79A)-G1Fc fusion polypeptide is encoded by the following nucleic acid sequence (SEQ ID NO: 385):

1 ATGGATGCAA TGAAGAGAGG GCTCTGCTGT GTGCTGCTGC TGTGTGGAGC
51 AGTCTTCGTT TCGCCCGGCG CCTCTGGGCG TGGGGAGGCT GAGACACGGG
101 AGTGCATCTA CTACAACGCC AACTGGGAGC TGGAGCGCAC CAACCAGAGC
151 GGCCTGGAGC GCTGCGAAGG CGAGCAGGAC AAGCGGCTGC ACTGCTACGC
201 CTCCTGGCGC AACAGCTCTG GCACCATCGA GCTCGTGAAG AAGGGCTGCT
251 GGGCCGATGA CTTCAACTGC TACGATAGGC AGGAGTGTGT GGCCACTGAG
301 GAGAACCCCC AGGTGTACTT CTGCTGCTGT GAAGGCAACT TCTGCAACGA
351 GCGCTTCACT CATTTGCCAG AGGCTGGGGG CCCGGAAGTC ACGTACGAGC
401 CACCCCCGAC AGCCCCCACC GGTGGTGGAA CTCACACATG CCCACCGTGC
451 CCAGCACCTG AACTCCTGGG GGGACCGTCA GTCTTCCTCT TCCCCCCAAA
501 ACCCAAGGAC ACCCTCATGA TCTCCCGGAC CCCTGAGGTC ACATGCGTGG
551 TGGTGGACGT GAGCCACGAA GACCCTGAGG TCAAGTTCAA CTGGTACGTG
601 GACGGCGTGG AGGTGCATAA TGCCAAGACA AAGCCGCGGG AGGAGCAGTA
651 CAACAGCACG TACCGTGTGG TCAGCGTCCT CACCGTCCTG CACCAGGACT
701 GGCTGAATGG CAAGGAGTAC AAGTGCAAGG TCTCCAACAA AGCCCTCCCA
751 GCCCCCATCG AGAAAACCAT CTCCAAAGCC AAAGGGCAGC CCCGAGAACC
801 ACAGGTGTAC ACCCTGCCCC CATCCCGGGA GGAGATGACC AAGAACCAGG
851 TCAGCCTGAC CTGCCTGGTC AAAGGCTTCT ATCCCAGCGA CATCGCCGTG
901 GAGTGGGAGA GCAATGGGCA GCCGGAGAAC AACTACAAGA CCACGCCTCC
951 CGTGCTGGAC TCCGACGGCT CCTTCTTCCT CTATAGCAAG CTCACCGTGG
1001 ACAAGAGCAG GTGGCAGCAG GGGAACGTCT TCTCATGCTC CGTGATGCAT
1051 GAGGCTCTGC ACAACCACTA CACGCAGAAG AGCCTCTCCC TGTCCCCGGG
1101 TAAA (SEQ ID NO: 385)

[0807] A mature ActRIIB(L79A)-G1Fc fusion polypeptide (SEQ ID NO: 386) is as follows and may optionally be provided with the lysine removed from the C-terminus. The G1Fc region may also comprise a mutation to an alanine at position 234 or a mutation to an alanine at position 235, or a combination thereof.

1 GRGEAETREC IYYNANWELE RTNQSGLERC EGEQDKRLHC YASWRNSSGT
51 IELVKKGCWA DDFNCYDRQE CVATEENPQV YFCCCEGNFC NERFTHLPEA
101 GGPEVTYEPP PTAPTGGGTH TCPPCPAPEL LGGPSVFLFP PKPKDTLMIS
151 RTPEVTCVVV DVSHEDPEVK FNWYVDGVEV HNAKTKPREE QYNSTYRVVS
201 VLTVLHQDWL NGKEYKCKVS NKALPAPIEK TISKAKGQPR EPQVYTLPPS
251 REEMTKNQVS LTCLVKGFYP SDIAVEWESN GQPENNYKTT PPVLDSDGSF
301 FLYSKLTVDK SRWQQGNVFS CSVMHEALHN HYTQKSLSLS PGK
(SEQ ID NO: 386)

[0808] The amino acid sequence of unprocessed ActRIIB(L79K)-G1Fc is shown below (SEQ ID NO: 387). The signal sequence and linker sequences are indicated by solid underline, and the L79K substitution is indicated by double underline. The amino acid sequence of SEQ ID NO: 387 may optionally be provided with the lysine removed from the C-terminus. The G1Fc region may also comprise a mutation to an alanine at position 234 or a mutation to an alanine at position 235, or a combination thereof.

1 MDAMKRGLCC VLLLCGAVFV SPGASGRGEA ETRECIYYNA NWELERTNQS
51 GLERCEGEQD KRLHCYASWR NSSGTIELVK KGCWKDDFNC YDRQECVATE
101 ENPQVYFCCC EGNFCNERFT HLPEAGGPEV TYEPPPTAPT GGGTHTCPPC
151 PAPELLGGPS VFLFPPKPKD TLMISRTPEV TCVVVDVSHE DPEVKFNWYV
201 DGVEVHNAKT KPREEQYNST YRVVSVLTVL HQDWLNGKEY KCKVSNKALP
251 APIEKTISKA KGQPREPQVY TLPPSREEMT KNQVSLTCLV KGFYPSDIAV
301 EWESNGQPEN NYKTTPPVLD SDGSFFLYSK LTVDKSRWQQ GNVFSCSVMH
351 EALHNHYTQK SLSLSPGK (SEQ ID NO: 387)

[0809] This ActRIIB(L79K)-G1Fc fusion polypeptide is encoded by the following nucleic acid sequence (SEQ ID NO: 388):

1 ATGGATGCAA TGAAGAGAGG GCTCTGCTGT GTGCTGCTGC TGTGTGGAGC
51 AGTCTTCGTT TCGCCCGGCG CCTCTGGGCG TGGGGAGGCT GAGACACGGG
101 AGTGCATCTA CTACAACGCC AACTGGGAGC TGGAGCGCAC CAACCAGAGC
151 GGCCTGGAGC GCTGCGAAGG CGAGCAGGAC AAGCGGCTGC ACTGCTACGC
201 CTCCTGGCGC AACAGCTCTG GCACCATCGA GCTCGTGAAG AAGGGCTGCT
251 GGAAGGATGA CTTCAACTGC TACGATAGGC AGGAGTGTGT GGCCACTGAG
301 GAGAACCCCC AGGTGTACTT CTGCTGCTGT GAAGGCAACT TCTGCAACGA
351 GCGCTTCACT CATTTGCCAG AGGCTGGGGG CCCGGAAGTC ACGTACGAGC
401 CACCCCCGAC AGCCCCCACC GGTGGTGGAA CTCACACATG CCCACCGTGC
451 CCAGCACCTG AACTCCTGGG GGGACCGTCA GTCTTCCTCT TCCCCCCAAA
501 ACCCAAGGAC ACCCTCATGA TCTCCCGGAC CCCTGAGGTC ACATGCGTGG
551 TGGTGGACGT GAGCCACGAA GACCCTGAGG TCAAGTTCAA CTGGTACGTG
601 GACGGCGTGG AGGTGCATAA TGCCAAGACA AAGCCGCGGG AGGAGCAGTA
651 CAACAGCACG TACCGTGTGG TCAGCGTCCT CACCGTCCTG CACCAGGACT
701 GGCTGAATGG CAAGGAGTAC AAGTGCAAGG TCTCCAACAA AGCCCTCCCA
751 GCCCCCATCG AGAAAACCAT CTCCAAAGCC AAAGGGCAGC CCCGAGAACC
801 ACAGGTGTAC ACCCTGCCCC CATCCCGGGA GGAGATGACC AAGAACCAGG
851 TCAGCCTGAC CTGCCTGGTC AAAGGCTTCT ATCCCAGCGA CATCGCCGTG
901 GAGTGGGAGA GCAATGGGCA GCCGGAGAAC AACTACAAGA CCACGCCTCC
951 CGTGCTGGAC TCCGACGGCT CCTTCTTCCT CTATAGCAAG CTCACCGTGG
1001 ACAAGAGCAG GTGGCAGCAG GGGAACGTCT TCTCATGCTC CGTGATGCAT
1051 GAGGCTCTGC ACAACCACTA CACGCAGAAG AGCCTCTCCC TGTCTCCGGG
1101 TAAA (SEQ ID NO: 388)

[0810] A mature ActRIIB(L79K)-G1Fc fusion polypeptide (SEQ ID NO: 389) is as follows and may optionally be provided with the lysine removed from the C-terminus. The G1Fc region may also comprise a mutation to an alanine at position 234 or a mutation to an alanine at position 235, or a combination thereof.

1 GRGEAETREC IYYNANWELE RTNQSGLERC EGEQDKRLHC YASWRNSSGT
51 IELVKKGCWK DDFNCYDRQE CVATEENPQV YFCCCEGNFC NERFTHLPEA
101 GGPEVTYEPP PTAPTGGGTH TCPPCPAPEL LGGPSVFLFP PKPKDTLMIS
151 RTPEVTCVVV DVSHEDPEVK FNWYVDGVEV HNAKTKPREE QYNSTYRVVS
201 VLTVLHQDWL NGKEYKCKVS NKALPAPIEK TISKAKGQPR EPQVYTLPPS
251 REEMTKNQVS LTCLVKGFYP SDIAVEWESN GQPENNYKTT PPVLDSDGSF
301 FLYSKLTVDK SRWQQGNVFS CSVMHEALHN HYTQKSLSLS PGK
(SEQ ID NO: 389)

[0811] The amino acid sequence of unprocessed ActRIIB(L79S)-G1Fc is shown below (SEQ ID NO: 390). The signal sequence and linker sequences are indicated by solid underline, and the L79S substitution is indicated by double underline. The amino acid sequence of SEQ ID NO: 390 may optionally be provided with the lysine removed from the C-terminus. The G1Fc region may also comprise a mutation to an alanine at position 234 or a mutation to an alanine at position 235, or a combination thereof.

1 MDAMKRGLCC VLLLCGAVFV SPGASGRGEA ETRECIYYNA NWELERTNQS
51 GLERCEGEQD KRLHCYASWR NSSGTIELVK KGCWSDDFNC YDRQECVATE
101 ENPQVYFCCC EGNFCNERFT HLPEAGGPEV TYEPPPTAPT GGGTHTCPPC
151 PAPELLGGPS VFLFPPKPKD TLMISRTPEV TCVVVDVSHE DPEVKFNWYV
201 DGVEVHNAKT KPREEQYNST YRVVSVLTVL HQDWLNGKEY KCKVSNKALP
251 APIEKTISKA KGQPREPQVY TLPPSREEMT KNQVSLTCLV KGFYPSDIAV
301 EWESNGQPEN NYKTTPPVLD SDGSFFLYSK LTVDKSRWQQ GNVFSCSVMH
351 EALHNHYTQK SLSLSPGK (SEQ ID NO: 390)

[0812] This ActRIIB(L79S)-G1Fc fusion polypeptide is encoded by the following nucleic acid sequence (SEQ ID NO: 391):

1 ATGGATGCAA TGAAGAGAGG GCTCTGCTGT GTGCTGCTGC TGTGTGGAGC
51 AGTCTTCGTT TCGCCCGGCG CCTCTGGGCG TGGGGAGGCT GAGACACGGG
101 AGTGCATCTA CTACAACGCC AACTGGGAGC TGGAGCGCAC CAACCAGAGC
151 GGCCTGGAGC GCTGCGAAGG CGAGCAGGAC AAGCGGCTGC ACTGCTACGC
201 CTCCTGGCGC AACAGCTCTG GCACCATCGA GCTCGTGAAG AAGGGCTGCT
251 GGAGCGATGA CTTCAACTGC TACGATAGGC AGGAGTGTGT GGCCACTGAG
301 GAGAACCCCC AGGTGTACTT CTGCTGCTGT GAAGGCAACT TCTGCAACGA
351 GCGCTTCACT CATTTGCCAG AGGCTGGGGG CCCGGAAGTC ACGTACGAGC
401 CACCCCCGAC AGCCCCCACC GGTGGTGGAA CTCACACATG CCCACCGTGC
451 CCAGCACCTG AACTCCTGGG GGGACCGTCA GTCTTCCTCT TCCCCCCAAA
501 ACCCAAGGAC ACCCTCATGA TCTCCCGGAC CCCTGAGGTC ACATGCGTGG
551 TGGTGGACGT GAGCCACGAA GACCCTGAGG TCAAGTTCAA CTGGTACGTG
601 GACGGCGTGG AGGTGCATAA TGCCAAGACA AAGCCGCGGG AGGAGCAGTA
651 CAACAGCACG TACCGTGTGG TCAGCGTCCT CACCGTCCTG CACCAGGACT
701 GGCTGAATGG CAAGGAGTAC AAGTGCAAGG TCTCCAACAA AGCCCTCCCA
751 GCCCCCATCG AGAAAACCAT CTCCAAAGCC AAAGGGCAGC CCCGAGAACC
801 ACAGGTGTAC ACCCTGCCCC CATCCCGGGA GGAGATGACC AAGAACCAGG
851 TCAGCCTGAC CTGCCTGGTC AAAGGCTTCT ATCCCAGCGA CATCGCCGTG
901 GAGTGGGAGA GCAATGGGCA GCCGGAGAAC AACTACAAGA CCACGCCTCC
951 CGTGCTGGAC TCCGACGGCT CCTTCTTCCT CTATAGCAAG CTCACCGTGG
1001 ACAAGAGCAG GTGGCAGCAG GGGAACGTCT TCTCATGCTC CGTGATGCAT
1051 GAGGCTCTGC ACAACCACTA CACGCAGAAG AGCCTCTCCC TGTCTCCGGG
1101 TAAA (SEQ ID NO: 391)

[0813] A mature ActRIIB(L79S)-G1Fc fusion polypeptide (SEQ ID NO: 392) is as follows and may optionally be provided with the lysine removed from the C-terminus. The G1Fc region may also comprise a mutation to an alanine at position 234 or a mutation to an alanine at position 235, or a combination thereof.

1 GRGEAETREC IYYNANWELE RTNQSGLERC EGEQDKRLHC YASWRNSSGT
51 IELVKKGCWS DDFNCYDRQE CVATEENPQV YFCCCEGNFC NERFTHLPEA
101 GGPEVTYEPP PTAPTGGGTH TCPPCPAPEL LGGPSVFLFP PKPKDTLMIS
151 RTPEVTCVVV DVSHEDPEVK FNWYVDGVEV HNAKTKPREE QYNSTYRVVS
201 VLTVLHQDWL NGKEYKCKVS NKALPAPIEK TISKAKGQPR EPQVYTLPPS
251 REEMTKNQVS LTCLVKGFYP SDIAVEWESN GQPENNYKTT PPVLDSDGSF
301 FLYSKLTVDK SRWQQGNVFS CSVMHEALHN HYTQKSLSLS PGK
(SEQ ID NO: 392)

[0814] The amino acid sequence of unprocessed ActRIIB(L79W)-G1Fc is shown below (SEQ ID NO: 393). The signal sequence and linker sequences are indicated by solid underline, and the L79W substitution is indicated by double underline. The amino acid sequence of SEQ ID NO: 393 may optionally be provided with the lysine removed from the C-terminus. The G1Fc region may also comprise a mutation to an alanine at position 234 or a mutation to an alanine at position 235, or a combination thereof.

1 MDAMKRGLCC VLLLCGAVFV SPGASGRGEA ETRECIYYNA NWELERTNQS
51 GLERCEGEQD KRLHCYASWR NSSGTIELVK KGCWWDDFNC YDRQECVATE
101 ENPQVYFCCC EGNFCNERFT HLPEAGGPEV TYEPPPTAPT GGGTHTCPPC
151 PAPELLGGPS VFLFPPKPKD TLMISRTPEV TCVVVDVSHE DPEVKFNWYV
201 DGVEVHNAKT KPREEQYNST YRVVSVLTVL HQDWLNGKEY KCKVSNKALP
251 APIEKTISKA KGQPREPQVY TLPPSREEMT KNQVSLTCLV KGFYPSDIAV
301 EWESNGQPEN NYKTTPPVLD SDGSFFLYSK LTVDKSRWQQ GNVFSCSVMH
351 EALHNHYTQK SLSLSPGK (SEQ ID NO: 393)

[0815] This ActRIIB(L79W)-G1Fc fusion polypeptide is encoded by the following nucleic acid sequence (SEQ ID NO: 394):

1 ATGGATGCAA TGAAGAGAGG GCTCTGCTGT GTGCTGCTGC TGTGTGGAGC
51 AGTCTTCGTT TCGCCCGGCG CCTCTGGGCG TGGGGAGGCT GAGACACGGG
101 AGTGCATCTA CTACAACGCC AACTGGGAGC TGGAGCGCAC CAACCAGAGC
151 GGCCTGGAGC GCTGCGAAGG CGAGCAGGAC AAGCGGCTGC ACTGCTACGC
201 CTCCTGGCGC AACAGCTCTG GCACCATCGA GCTCGTGAAG AAGGGCTGCT
251 GGTGGGATGA CTTTAACTGC TACGATAGGC AGGAGTGTGT GGCCACTGAG
301 GAGAACCCCC AGGTGTACTT CTGCTGCTGT GAAGGCAACT TCTGCAACGA
351 GCGCTTCACT CATTTGCCAG AGGCTGGGGG CCCGGAAGTC ACGTACGAGC
401 CACCCCCGAC AGCCCCCACC GGTGGTGGAA CTCACACATG CCCACCGTGC
451 CCAGCACCTG AACTCCTGGG GGGACCGTCA GTCTTCCTCT TCCCCCCAAA
501 ACCCAAGGAC ACCCTCATGA TCTCCCGGAC CCCTGAGGTC ACATGCGTGG
551 TGGTGGACGT GAGCCACGAA GACCCTGAGG TCAAGTTCAA CTGGTACGTG
601 GACGGCGTGG AGGTGCATAA TGCCAAGACA AAGCCGCGGG AGGAGCAGTA
651 CAACAGCACG TACCGTGTGG TCAGCGTCCT CACCGTCCTG CACCAGGACT
701 GGCTGAATGG CAAGGAGTAC AAGTGCAAGG TCTCCAACAA AGCCCTCCCA
751 GCCCCCATCG AGAAAACCAT CTCCAAAGCC AAAGGGCAGC CCCGAGAACC
801 ACAGGTGTAC ACCCTGCCCC CATCCCGGGA GGAGATGACC AAGAACCAGG
851 TCAGCCTGAC CTGCCTGGTC AAAGGCTTCT ATCCCAGCGA CATCGCCGTG
901 GAGTGGGAGA GCAATGGGCA GCCGGAGAAC AACTACAAGA CCACGCCTCC
951 CGTGCTGGAC TCCGACGGCT CCTTCTTCCT CTATAGCAAG CTCACCGTGG
1001 ACAAGAGCAG GTGGCAGCAG GGGAACGTCT TCTCATGCTC CGTGATGCAT
1051 GAGGCTCTGC ACAACCACTA CACGCAGAAG AGCCTCTCCC TGTCTCCGGG
1101 TAAA (SEQ ID NO: 394)

[0816] A mature ActRIIB(L79W)-G1Fc fusion polypeptide (SEQ ID NO: 395) is as follows and may optionally be provided with the lysine removed from the C-terminus. The G1Fc region may also comprise a mutation to an alanine at position 234 or a mutation to an alanine at position 235, or a combination thereof.

1 GRGEAETREC IYYNANWELE RTNQSGLERC EGEQDKRLHC YASWRNSSGT
51 IELVKKGCWW DDFNCYDRQE CVATEENPQV YFCCCEGNFC NERFTHLPEA
101 GGPEVTYEPP PTAPTGGGTH TCPPCPAPEL LGGPSVFLFP PKPKDTLMIS
151 RTPEVTCVVV DVSHEDPEVK FNWYVDGVEV HNAKTKPREE QYNSTYRVVS
201 VLTVLHQDWL NGKEYKCKVS NKALPAPIEK TISKAKGQPR EPQVYTLPPS
251 REEMTKNQVS LTCLVKGFYP SDIAVEWESN GQPENNYKTT PPVLDSDGSF
301 FLYSKLTVDK SRWQQGNVFS CSVMHEALHN HYTQKSLSLS PGK
(SEQ ID NO: 395)

[0817] The amino acid sequence of unprocessed ActRIIB(F82D)-G1Fc is shown below (SEQ ID NO: 396). The signal sequence and linker sequences are indicated by solid underline, and the F82D substitution is indicated by double underline. The amino acid sequence of SEQ ID NO: 396 may optionally be provided with the lysine removed from the C-terminus. The G1Fc region may also comprise a mutation to an alanine at position 234 or a mutation to an alanine at position 235, or a combination thereof.

1 MDAMKRGLCC VLLLCGAVFV SPGASGRGEA ETRECIYYNA NWELERTNQS
51 GLERCEGEQD KRLHCYASWR NSSGTIELVK KGCWLDDDNC YDRQECVATE
101 ENPQVYFCCC EGNFCNERFT HLPEAGGPEV TYEPPPTAPT GGGTHTCPPC
151 PAPELLGGPS VFLFPPKPKD TLMISRTPEV TCVVVDVSHE DPEVKFNWYV
201 DGVEVHNAKT KPREEQYNST YRVVSVLTVL HQDWLNGKEY KCKVSNKALP
251 APIEKTISKA KGQPREPQVY TLPPSREEMT KNQVSLTCLV KGFYPSDIAV
301 EWESNGQPEN NYKTTPPVLD SDGSFFLYSK LTVDKSRWQQ GNVFSCSVMH
351 EALHNHYTQK SLSLSPGK (SEQ ID NO: 396)

[0818] This ActRIIB(F82D)-G1Fc fusion polypeptide is encoded by the following nucleic acid sequence (SEQ ID NO: 397):

1 ATGGATGCAA TGAAGAGAGG GCTCTGCTGT GTGCTGCTGC TGTGTGGAGC
51 AGTCTTCGTT TCGCCCGGCG CCTCTGGGCG TGGGGAGGCT GAGACACGGG
101 AGTGCATCTA CTACAACGCC AACTGGGAGC TGGAGCGCAC CAACCAGAGC
151 GGCCTGGAGC GCTGCGAAGG CGAGCAGGAC AAGCGGCTGC ACTGCTACGC
201 CTCCTGGCGC AACAGCTCTG GCACCATCGA GCTCGTGAAG AAGGGCTGCT
251 GGCTAGATGA CGACAACTGC TACGATAGGC AGGAGTGTGT GGCCACTGAG
301 GAGAACCCCC AGGTGTACTT CTGCTGCTGT GAAGGCAACT TCTGCAACGA
351 GCGCTTCACT CATTTGCCAG AGGCTGGGGG CCCGGAAGTC ACGTACGAGC
401 CACCCCCGAC AGCCCCCACC GGTGGTGGAA CTCACACATG CCCACCGTGC
451 CCAGCACCTG AACTCCTGGG GGGACCGTCA GTCTTCCTCT TCCCCCCAAA
501 ACCCAAGGAC ACCCTCATGA TCTCCCGGAC CCCTGAGGTC ACATGCGTGG
551 TGGTGGACGT GAGCCACGAA GACCCTGAGG TCAAGTTCAA CTGGTACGTG
601 GACGGCGTGG AGGTGCATAA TGCCAAGACA AAGCCGCGGG AGGAGCAGTA
651 CAACAGCACG TACCGTGTGG TCAGCGTCCT CACCGTCCTG CACCAGGACT
701 GGCTGAATGG CAAGGAGTAC AAGTGCAAGG TCTCCAACAA AGCCCTCCCA
751 GCCCCCATCG AGAAAACCAT CTCCAAAGCC AAAGGGCAGC CCCGAGAACC
801 ACAGGTGTAC ACCCTGCCCC CATCCCGGGA GGAGATGACC AAGAACCAGG
851 TCAGCCTGAC CTGCCTGGTC AAAGGCTTCT ATCCCAGCGA CATCGCCGTG
901 GAGTGGGAGA GCAATGGGCA GCCGGAGAAC AACTACAAGA CCACGCCTCC
951 CGTGCTGGAC TCCGACGGCT CCTTCTTCCT CTATAGCAAG CTCACCGTGG
1001 ACAAGAGCAG GTGGCAGCAG GGGAACGTCT TCTCATGCTC CGTGATGCAT
1051 GAGGCTCTGC ACAACCACTA CACGCAGAAG AGCCTCTCCC TGTCTCCGGG
1101 TAAA (SEQ ID NO: 397)

[0819] A mature ActRIIB(F82D)-G1Fc fusion polypeptide (SEQ ID NO: 398) is as follows and may optionally be provided with the lysine removed from the C-terminus. The G1Fc region may also comprise a mutation to an alanine at position 234 or a mutation to an alanine at position 235, or a combination thereof.

1 GRGEAETREC IYYNANWELE RTNQSGLERC EGEQDKRLHC YASWRNSSGT
51 IELVKKGCWL DDDNCYDRQE CVATEENPQV YFCCCEGNFC NERFTHLPEA
101 GGPEVTYEPP PTAPTGGGTH TCPPCPAPEL LGGPSVFLFP PKPKDTLMIS
151 RTPEVTCVVV DVSHEDPEVK FNWYVDGVEV HNAKTKPREE QYNSTYRVVS
201 VLTVLHQDWL NGKEYKCKVS NKALPAPIEK TISKAKGQPR EPQVYTLPPS
251 REEMTKNQVS LTCLVKGFYP SDIAVEWESN GQPENNYKTT PPVLDSDGSF
301 FLYSKLTVDK SRWQQGNVFS CSVMHEALHN HYTQKSLSLS PGK
(SEQ ID NO: 398)

[0820] The amino acid sequence of unprocessed ActRIIB(F82E)-G1Fc is shown below (SEQ ID NO: 399). The signal sequence and linker sequences are indicated by solid underline, and the F82E substitution is indicated by double underline. The amino acid sequence of SEQ ID NO: 399 may optionally be provided with the lysine removed from the C-terminus. The G1Fc region may also comprise a mutation to an alanine at position 234 or a mutation to an alanine at position 235, or a combination thereof.

1 MDAMKRGLCC VLLLCGAVFV SPGASGRGEA ETRECIYYNA NWELERTNQS
51 GLERCEGEQD KRLHCYASWR NSSGTIELVK KGCWLDDENC YDRQECVATE
101 ENPQVYFCCC EGNFCNERFT HLPEAGGPEV TYEPPPTAPT GGGTHTCPPC
151 PAPELLGGPS VFLFPPKPKD TLMISRTPEV TCVVVDVSHE DPEVKFNWYV
201 DGVEVHNAKT KPREEQYNST YRVVSVLTVL HQDWLNGKEY KCKVSNKALP
251 APIEKTISKA KGQPREPQVY TLPPSREEMT KNQVSLTCLV KGFYPSDIAV
301 EWESNGQPEN NYKTTPPVLD SDGSFFLYSK LTVDKSRWQQ GNVFSCSVMH
351 EALHNHYTQK SLSLSPGK (SEQ ID NO: 399)

[0821] This ActRIIB(F82E)-G1Fc fusion polypeptide is encoded by the following nucleic acid sequence (SEQ ID NO: 400):

1 ATGGATGCAA TGAAGAGAGG GCTCTGCTGT GTGCTGCTGC TGTGTGGAGC
51 AGTCTTCGTT TCGCCCGGCG CCTCTGGGCG TGGGGAGGCT GAGACACGGG
101 AGTGCATCTA CTACAACGCC AACTGGGAGC TGGAGCGCAC CAACCAGAGC
151 GGCCTGGAGC GCTGCGAAGG CGAGCAGGAC AAGCGGCTGC ACTGCTACGC
201 CTCCTGGCGC AACAGCTCTG GCACCATCGA GCTCGTGAAG AAGGGCTGCT
251 GGCTAGATGA CGAGAACTGC TACGATAGGC AGGAGTGTGT GGCCACTGAG
301 GAGAACCCCC AGGTGTACTT CTGCTGCTGT GAAGGCAACT TCTGCAACGA
351 GCGCTTCACT CATTTGCCAG AGGCTGGGGG CCCGGAAGTC ACGTACGAGC
401 CACCCCCGAC AGCCCCCACC GGTGGTGGAA CTCACACATG CCCACCGTGC
451 CCAGCACCTG AACTCCTGGG GGGACCGTCA GTCTTCCTCT TCCCCCCAAA
501 ACCCAAGGAC ACCCTCATGA TCTCCCGGAC CCCTGAGGTC ACATGCGTGG
551 TGGTGGACGT GAGCCACGAA GACCCTGAGG TCAAGTTCAA CTGGTACGTG
601 GACGGCGTGG AGGTGCATAA TGCCAAGACA AAGCCGCGGG AGGAGCAGTA
651 CAACAGCACG TACCGTGTGG TCAGCGTCCT CACCGTCCTG CACCAGGACT
701 GGCTGAATGG CAAGGAGTAC AAGTGCAAGG TCTCCAACAA AGCCCTCCCA
751 GCCCCCATCG AGAAAACCAT CTCCAAAGCC AAAGGGCAGC CCCGAGAACC
801 ACAGGTGTAC ACCCTGCCCC CATCCCGGGA GGAGATGACC AAGAACCAGG
851 TCAGCCTGAC CTGCCTGGTC AAAGGCTTCT ATCCCAGCGA CATCGCCGTG
901 GAGTGGGAGA GCAATGGGCA GCCGGAGAAC AACTACAAGA CCACGCCTCC
951 CGTGCTGGAC TCCGACGGCT CCTTCTTCCT CTATAGCAAG CTCACCGTGG
1001 ACAAGAGCAG GTGGCAGCAG GGGAACGTCT TCTCATGCTC CGTGATGCAT
1051 GAGGCTCTGC ACAACCACTA CACGCAGAAG AGCCTCTCCC TGTCTCCGGG
1101 TAAA (SEQ ID NO: 400)

[0822] A mature ActRIIB(F82E)-G1Fc fusion polypeptide (SEQ ID NO: 401) is as follows and may optionally be provided with the lysine removed from the C-terminus. The G1Fc region may also comprise a mutation to an alanine at position 234 or a mutation to an alanine at position 235, or a combination thereof.

1 GRGEAETREC IYYNANWELE RTNQSGLERC EGEQDKRLHC YASWRNSSGT
51 IELVKKGCWL DDENCYDRQE CVATEENPQV YFCCCEGNFC NERFTHLPEA
101 GGPEVTYEPP PTAPTGGGTH TCPPCPAPEL LGGPSVFLFP PKPKDTLMIS
151 RTPEVTCVVV DVSHEDPEVK FNWYVDGVEV HNAKTKPREE QYNSTYRVVS
201 VLTVLHQDWL NGKEYKCKVS NKALPAPIEK TISKAKGQPR EPQVYTLPPS
251 REEMTKNQVS LTCLVKGFYP SDIAVEWESN GQPENNYKTT PPVLDSDGSF
301 FLYSKLTVDK SRWQQGNVFS CSVMHEALHN HYTQKSLSLS PGK
(SEQ ID NO: 401)

[0823] The amino acid sequence of unprocessed ActRIIB(F82L)-G1Fc is shown below (SEQ ID NO: 402). The signal sequence and linker sequences are indicated by solid underline, and the F82L substitution is indicated by double underline. The amino acid sequence of SEQ ID NO: 402 may optionally be provided with the lysine removed from the C-terminus. The G1Fc region may also comprise a mutation to an alanine at position 234 or a mutation to an alanine at position 235, or a combination thereof.

1 MDAMKRGLCC VLLLCGAVFV SPGASGRGEA ETRECIYYNA NWELERTNQS
51 GLERCEGEQD KRLHCYASWR NSSGTIELVK KGCWLDDLNC YDRQECVATE
101 ENPQVYFCCC EGNFCNERFT HLPEAGGPEV TYEPPPTAPT GGGTHTCPPC
151 PAPELLGGPS VFLFPPKPKD TLMISRTPEV TCVVVDVSHE DPEVKFNWYV
201 DGVEVHNAKT KPREEQYNST YRVVSVLTVL HQDWLNGKEY KCKVSNKALP
251 APIEKTISKA KGQPREPQVY TLPPSREEMT KNQVSLTCLV KGFYPSDIAV
301 EWESNGQPEN NYKTTPPVLD SDGSFFLYSK LTVDKSRWQQ GNVFSCSVMH
351 EALHNHYTQK SLSLSPGK (SEQ ID NO: 402)

[0824] This ActRIIB(F82L)-G1Fc fusion polypeptide is encoded by the following nucleic acid sequence (SEQ ID NO: 403):

1 ATGGATGCAA TGAAGAGAGG GCTCTGCTGT GTGCTGCTGC TGTGTGGAGC
51 AGTCTTCGTT TCGCCCGGCG CCTCTGGGCG TGGGGAGGCT GAGACACGGG
101 AGTGCATCTA CTACAACGCC AACTGGGAGC TGGAGCGCAC CAACCAGAGC
151 GGCCTGGAGC GCTGCGAAGG CGAGCAGGAC AAGCGGCTGC ACTGCTACGC
201 CTCCTGGCGC AACAGCTCTG GCACCATCGA GCTCGTGAAG AAGGGCTGCT
251 GGCTAGATGA CCTGAACTGC TACGATAGGC AGGAGTGTGT GGCCACTGAG
301 GAGAACCCCC AGGTGTACTT CTGCTGCTGT GAAGGCAACT TCTGCAACGA
351 GCGCTTCACT CATTTGCCAG AGGCTGGGGG CCCGGAAGTC ACGTACGAGC
401 CACCCCCGAC AGCCCCCACC GGTGGTGGAA CTCACACATG CCCACCGTGC
451 CCAGCACCTG AACTCCTGGG GGGACCGTCA GTCTTCCTCT TCCCCCCAAA
501 ACCCAAGGAC ACCCTCATGA TCTCCCGGAC CCCTGAGGTC ACATGCGTGG
551 TGGTGGACGT GAGCCACGAA GACCCTGAGG TCAAGTTCAA CTGGTACGTG
601 GACGGCGTGG AGGTGCATAA TGCCAAGACA AAGCCGCGGG AGGAGCAGTA
651 CAACAGCACG TACCGTGTGG TCAGCGTCCT CACCGTCCTG CACCAGGACT
701 GGCTGAATGG CAAGGAGTAC AAGTGCAAGG TCTCCAACAA AGCCCTCCCA
751 GCCCCCATCG AGAAAACCAT CTCCAAAGCC AAAGGGCAGC CCCGAGAACC
801 ACAGGTGTAC ACCCTGCCCC CATCCCGGGA GGAGATGACC AAGAACCAGG
851 TCAGCCTGAC CTGCCTGGTC AAAGGCTTCT ATCCCAGCGA CATCGCCGTG
901 GAGTGGGAGA GCAATGGGCA GCCGGAGAAC AACTACAAGA CCACGCCTCC
951 CGTGCTGGAC TCCGACGGCT CCTTCTTCCT CTATAGCAAG CTCACCGTGG
1001 ACAAGAGCAG GTGGCAGCAG GGGAACGTCT TCTCATGCTC CGTGATGCAT
1051 GAGGCTCTGC ACAACCACTA CACGCAGAAG AGCCTCTCCC TGTCTCCGGG
1101 TAAA (SEQ ID NO: 403)

[0825] A mature ActRIIB(F82L)-G1Fc fusion polypeptide (SEQ ID NO: 404) is as follows and may optionally be provided with the lysine removed from the C-terminus. The G1Fc region may also comprise a mutation to an alanine at position 234 or a mutation to an alanine at position 235, or a combination thereof.

1 GRGEAETREC IYYNANWELE RTNQSGLERC EGEQDKRLHC YASWRNSSGT
51 IELVKKGCWL DDLNCYDRQE CVATEENPQV YFCCCEGNFC NERFTHLPEA
101 GGPEVTYEPP PTAPTGGGTH TCPPCPAPEL LGGPSVFLFP PKPKDTLMIS
151 RTPEVTCVVV DVSHEDPEVK FNWYVDGVEV HNAKTKPREE QYNSTYRVVS
201 VLTVLHQDWL NGKEYKCKVS NKALPAPIEK TISKAKGQPR EPQVYTLPPS
251 REEMTKNQVS LTCLVKGFYP SDIAVEWESN GQPENNYKTT PPVLDSDGSF
301 FLYSKLTVDK SRWQQGNVFS CSVMHEALHN HYTQKSLSLS PGK
(SEQ ID NO: 404)

[0826] The amino acid sequence of unprocessed ActRIIB(F82S)-G1Fc is shown below (SEQ ID NO: 405). The signal sequence and linker sequences are indicated by solid underline, and the F82S substitution is indicated by double underline. The amino acid sequence of SEQ ID NO: 405 may optionally be provided with the lysine removed from the C-terminus. The G1Fc region may also comprise a mutation to an alanine at position 234 or a mutation to an alanine at position 235, or a combination thereof.

1 MDAMKRGLCC VLLLCGAVFV SPGASGRGEA ETRECIYYNA NWELERTNQS
51 GLERCEGEQD KRLHCYASWR NSSGTIELVK KGCWLDDSNC YDRQECVATE
101 ENPQVYFCCC EGNFCNERFT HLPEAGGPEV TYEPPPTAPT GGGTHTCPPC
151 PAPELLGGPS VFLFPPKPKD TLMISRTPEV TCVVVDVSHE DPEVKFNWYV
201 DGVEVHNAKT KPREEQYNST YRVVSVLTVL HQDWLNGKEY KCKVSNKALP
251 APIEKTISKA KGQPREPQVY TLPPSREEMT KNQVSLTCLV KGFYPSDIAV
301 EWESNGQPEN NYKTTPPVLD SDGSFFLYSK LTVDKSRWQQ GNVFSCSVMH
351 EALHNHYTQK SLSLSPGK (SEQ ID NO: 405)

[0827] This ActRIIB(F82S)-G1Fc fusion polypeptide is encoded by the following nucleic acid sequence (SEQ ID NO: 406):

1 ATGGATGCAA TGAAGAGAGG GCTCTGCTGT GTGCTGCTGC TGTGTGGAGC
51 AGTCTTCGTT TCGCCCGGCG CCTCTGGGCG TGGGGAGGCT GAGACACGGG
101 AGTGCATCTA CTACAACGCC AACTGGGAGC TGGAGCGCAC CAACCAGAGC
151 GGCCTGGAGC GCTGCGAAGG CGAGCAGGAC AAGCGGCTGC ACTGCTACGC
201 CTCCTGGCGC AACAGCTCTG GCACCATCGA GCTCGTGAAG AAGGGCTGCT
251 GGCTAGATGA CTCCAACTGC TACGATAGGC AGGAGTGTGT GGCCACTGAG
301 GAGAACCCCC AGGTGTACTT CTGCTGCTGT GAAGGCAACT TCTGCAACGA
351 GCGCTTCACT CATTTGCCAG AGGCTGGGGG CCCGGAAGTC ACGTACGAGC
401 CACCCCCGAC AGCCCCCACC GGTGGTGGAA CTCACACATG CCCACCGTGC
451 CCAGCACCTG AACTCCTGGG GGGACCGTCA GTCTTCCTCT TCCCCCCAAA
501 ACCCAAGGAC ACCCTCATGA TCTCCCGGAC CCCTGAGGTC ACATGCGTGG
551 TGGTGGACGT GAGCCACGAA GACCCTGAGG TCAAGTTCAA CTGGTACGTG
601 GACGGCGTGG AGGTGCATAA TGCCAAGACA AAGCCGCGGG AGGAGCAGTA
651 CAACAGCACG TACCGTGTGG TCAGCGTCCT CACCGTCCTG CACCAGGACT
701 GGCTGAATGG CAAGGAGTAC AAGTGCAAGG TCTCCAACAA AGCCCTCCCA
751 GCCCCCATCG AGAAAACCAT CTCCAAAGCC AAAGGGCAGC CCCGAGAACC
801 ACAGGTGTAC ACCCTGCCCC CATCCCGGGA GGAGATGACC AAGAACCAGG
851 TCAGCCTGAC CTGCCTGGTC AAAGGCTTCT ATCCCAGCGA CATCGCCGTG
901 GAGTGGGAGA GCAATGGGCA GCCGGAGAAC AACTACAAGA CCACGCCTCC
951 CGTGCTGGAC TCCGACGGCT CCTTCTTCCT CTATAGCAAG CTCACCGTGG
1001 ACAAGAGCAG GTGGCAGCAG GGGAACGTCT TCTCATGCTC CGTGATGCAT
1051 GAGGCTCTGC ACAACCACTA CACGCAGAAG AGCCTCTCCC TGTCTCCGGG
1101 TAAA (SEQ ID NO: 406)

[0828] A mature ActRIIB(F82S)-G1Fc fusion polypeptide (SEQ ID NO: 407) is as follows and may optionally be provided with the lysine removed from the C-terminus. The G1Fc region may also comprise a mutation to an alanine at position 234 or a mutation to an alanine at position 235, or a combination thereof.

1 GRGEAETREC IYYNANWELE RTNQSGLERC EGEQDKRLHC YASWRNSSGT
51 IELVKKGCWL DDSNCYDRQE CVATEENPQV YFCCCEGNFC NERFTHLPEA
101 GGPEVTYEPP PTAPTGGGTH TCPPCPAPEL LGGPSVFLFP PKPKDTLMIS
151 RTPEVTCVVV DVSHEDPEVK FNWYVDGVEV HNAKTKPREE QYNSTYRVVS
201 VLTVLHQDWL NGKEYKCKVS NKALPAPIEK TISKAKGQPR EPQVYTLPPS
251 REEMTKNQVS LTCLVKGFYP SDIAVEWESN GQPENNYKTT PPVLDSDGSF
301 FLYSKLTVDK SRWQQGNVFS CSVMHEALHN HYTQKSLSLS PGK
(SEQ ID NO: 407)

[0829] The amino acid sequence of unprocessed ActRIIB(F82Y)-G1Fc is shown below (SEQ ID NO: 408). The signal sequence and linker sequences are indicated by solid underline, and the F82Y substitution is indicated by double underline. The amino acid sequence of SEQ ID NO: 408 may optionally be provided with the lysine removed from the C-terminus. The G1Fc region may also comprise a mutation to an alanine at position 234 or a mutation to an alanine at position 235, or a combination thereof.

1 MDAMKRGLCC VLLLCGAVFV SPGASGRGEA ETRECIYYNA NWELERTNQS
51 GLERCEGEQD KRLHCYASWR NSSGTIELVK KGCWLDDYNC YDRQECVATE
101 ENPQVYFCCC EGNFCNERFT HLPEAGGPEV TYEPPPTAPT GGGTHTCPPC
151 PAPELLGGPS VFLFPPKPKD TLMISRTPEV TCVVVDVSHE DPEVKFNWYV
201 DGVEVHNAKT KPREEQYNST YRVVSVLTVL HQDWLNGKEY KCKVSNKALP
251 APIEKTISKA KGQPREPQVY TLPPSREEMT KNQVSLTCLV KGFYPSDIAV
301 EWESNGQPEN NYKTTPPVLD SDGSFFLYSK LTVDKSRWQQ GNVFSCSVMH
351 EALHNHYTQK SLSLSPGK (SEQ ID NO: 408)

[0830] This ActRIIB(F82Y)-G1Fc fusion polypeptide is encoded by the following nucleic acid sequence (SEQ ID NO: 409):

1 ATGGATGCAA TGAAGAGAGG GCTCTGCTGT GTGCTGCTGC TGTGTGGAGC
51 AGTCTTCGTT TCGCCCGGCG CCTCTGGGCG TGGGGAGGCT GAGACACGGG
101 AGTGCATCTA CTACAACGCC AACTGGGAGC TGGAGCGCAC CAACCAGAGC
151 GGCCTGGAGC GCTGCGAAGG CGAGCAGGAC AAGCGGCTGC ACTGCTACGC
201 CTCCTGGCGC AACAGCTCTG GCACCATCGA GCTCGTGAAG AAGGGCTGCT
251 GGCTAGATGA CTACAACTGC TACGATAGGC AGGAGTGTGT GGCCACTGAG
301 GAGAACCCCC AGGTGTACTT CTGCTGCTGT GAAGGCAACT TCTGCAACGA
351 GCGCTTCACT CATTTGCCAG AGGCTGGGGG CCCGGAAGTC ACGTACGAGC
401 CACCCCCGAC AGCCCCCACC GGTGGTGGAA CTCACACATG CCCACCGTGC
451 CCAGCACCTG AACTCCTGGG GGGACCGTCA GTCTTCCTCT TCCCCCCAAA
501 ACCCAAGGAC ACCCTCATGA TCTCCCGGAC CCCTGAGGTC ACATGCGTGG
551 TGGTGGACGT GAGCCACGAA GACCCTGAGG TCAAGTTCAA CTGGTACGTG
601 GACGGCGTGG AGGTGCATAA TGCCAAGACA AAGCCGCGGG AGGAGCAGTA
651 CAACAGCACG TACCGTGTGG TCAGCGTCCT CACCGTCCTG CACCAGGACT
701 GGCTGAATGG CAAGGAGTAC AAGTGCAAGG TCTCCAACAA AGCCCTCCCA
751 GCCCCCATCG AGAAAACCAT CTCCAAAGCC AAAGGGCAGC CCCGAGAACC
801 ACAGGTGTAC ACCCTGCCCC CATCCCGGGA GGAGATGACC AAGAACCAGG
851 TCAGCCTGAC CTGCCTGGTC AAAGGCTTCT ATCCCAGCGA CATCGCCGTG
901 GAGTGGGAGA GCAATGGGCA GCCGGAGAAC AACTACAAGA CCACGCCTCC
951 CGTGCTGGAC TCCGACGGCT CCTTCTTCCT CTATAGCAAG CTCACCGTGG
1001 ACAAGAGCAG GTGGCAGCAG GGGAACGTCT TCTCATGCTC CGTGATGCAT
1051 GAGGCTCTGC ACAACCACTA CACGCAGAAG AGCCTCTCCC TGTCTCCGGG
1101 TAAA (SEQ ID NO: 409)

[0831] A mature ActRIIB(F82Y)-G1Fc fusion polypeptide (SEQ ID NO: 410) is as follows and may optionally be provided with the lysine removed from the C-terminus. The G1Fc region may also comprise a mutation to an alanine at position 234 or a mutation to an alanine at position 235, or a combination thereof.

1 GRGEAETREC IYYNANWELE RTNQSGLERC EGEQDKRLHC YASWRNSSGT
51 IELVKKGCWL DDYNCYDRQE CVATEENPQV YFCCCEGNFC NERFTHLPEA
101 GGPEVTYEPP PTAPTGGGTH TCPPCPAPEL LGGPSVFLFP PKPKDTLMIS
151 RTPEVTCVVV DVSHEDPEVK FNWYVDGVEV HNAKTKPREE QYNSTYRVVS
201 VLTVLHQDWL NGKEYKCKVS NKALPAPIEK TISKAKGQPR EPQVYTLPPS
251 REEMTKNQVS LTCLVKGFYP SDIAVEWESN GQPENNYKTT PPVLDSDGSF
301 FLYSKLTVDK SRWQQGNVFS CSVMHEALHN HYTQKSLSLS PGK
(SEQ ID NO: 410)

[0832] The amino acid sequence of unprocessed ActRIIB(E94K)-G1Fc is shown below (SEQ ID NO: 411). The signal sequence and linker sequences are indicated by solid underline, and the E94K substitution is indicated by double underline. The amino acid sequence of SEQ ID NO: 411 may optionally be provided with the lysine removed from the C-terminus. The G1Fc region may also comprise a mutation to an alanine at position 234 or a mutation to an alanine at position 235, or a combination thereof.

1 MDAMKRGLCC VLLLCGAVFV SPGASGRGEA ETRECIYYNA NWELERTNQS
51 GLERCEGEQD KRLHCYASWR NSSGTIELVK KGCWLDDFNC YDRQECVATK
101 ENPQVYFCCC EGNFCNERFT HLPEAGGPEV TYEPPPTAPT GGGTHTCPPC
151 PAPELLGGPS VFLFPPKPKD TLMISRTPEV TCVVVDVSHE DPEVKFNWYV
201 DGVEVHNAKT KPREEQYNST YRVVSVLTVL HQDWLNGKEY KCKVSNKALP
251 APIEKTISKA KGQPREPQVY TLPPSREEMT KNQVSLTCLV KGFYPSDIAV
301 EWESNGQPEN NYKTTPPVLD SDGSFFLYSK LTVDKSRWQQ GNVFSCSVMH
351 EALHNHYTQK SLSLSPGK (SEQ ID NO: 411)

[0833] This ActRIIB(E94K)-G1Fc fusion polypeptide is encoded by the following nucleic acid sequence (SEQ ID NO: 412):

1 ATGGATGCAA TGAAGAGAGG GCTCTGCTGT GTGCTGCTGC TGTGTGGAGC
51 AGTCTTCGTT TCGCCCGGCG CCTCTGGGCG TGGGGAGGCT GAGACACGGG
101 AGTGCATCTA CTACAACGCC AACTGGGAGC TGGAGCGCAC CAACCAGAGC
151 GGCCTGGAGC GCTGCGAAGG CGAGCAGGAC AAGCGGCTGC ACTGCTACGC
201 CTCCTGGCGC AACAGCTCTG GCACCATCGA GCTCGTGAAG AAGGGCTGCT
251 GGCTAGATGA CTTCAACTGC TACGATAGGC AGGAGTGTGT GGCCACTAAG
301 GAGAACCCCC AGGTGTACTT CTGCTGCTGT GAAGGCAACT TCTGCAACGA
351 GCGCTTCACT CATTTGCCAG AGGCTGGGGG CCCGGAAGTC ACGTACGAGC
401 CACCCCCGAC AGCCCCCACC GGTGGTGGAA CTCACACATG CCCACCGTGC
451 CCAGCACCTG AACTCCTGGG GGGACCGTCA GTCTTCCTCT TCCCCCCAAA
501 ACCCAAGGAC ACCCTCATGA TCTCCCGGAC CCCTGAGGTC ACATGCGTGG
551 TGGTGGACGT GAGCCACGAA GACCCTGAGG TCAAGTTCAA CTGGTACGTG
601 GACGGCGTGG AGGTGCATAA TGCCAAGACA AAGCCGCGGG AGGAGCAGTA
651 CAACAGCACG TACCGTGTGG TCAGCGTCCT CACCGTCCTG CACCAGGACT
701 GGCTGAATGG CAAGGAGTAC AAGTGCAAGG TCTCCAACAA AGCCCTCCCA
751 GCCCCCATCG AGAAAACCAT CTCCAAAGCC AAAGGGCAGC CCCGAGAACC
801 ACAGGTGTAC ACCCTGCCCC CATCCCGGGA GGAGATGACC AAGAACCAGG
851 TCAGCCTGAC CTGCCTGGTC AAAGGCTTCT ATCCCAGCGA CATCGCCGTG
901 GAGTGGGAGA GCAATGGGCA GCCGGAGAAC AACTACAAGA CCACGCCTCC
951 CGTGCTGGAC TCCGACGGCT CCTTCTTCCT CTATAGCAAG CTCACCGTGG
1001 ACAAGAGCAG GTGGCAGCAG GGGAACGTCT TCTCATGCTC CGTGATGCAT
1051 GAGGCTCTGC ACAACCACTA CACGCAGAAG AGCCTCTCCC TGTCTCCGGG
1101 TAAA (SEQ ID NO: 412)

[0834] A mature ActRIIB(E94K)-G1Fc fusion polypeptide (SEQ ID NO: 413) is as follows and may optionally be provided with the lysine removed from the C-terminus. The G1Fc region may also comprise a mutation to an alanine at position 234 or a mutation to an alanine at position 235, or a combination thereof.

1 GRGEAETREC IYYNANWELE RTNQSGLERC EGEQDKRLHC YASWRNSSGT
51 IELVKKGCWL DDFNCYDRQE CVATKENPQV YFCCCEGNFC NERFTHLPEA
101 GGPEVTYEPP PTAPTGGGTH TCPPCPAPEL LGGPSVFLFP PKPKDTLMIS
151 RTPEVTCVVV DVSHEDPEVK FNWYVDGVEV HNAKTKPREE QYNSTYRVVS
201 VLTVLHQDWL NGKEYKCKVS NKALPAPIEK TISKAKGQPR EPQVYTLPPS
251 REEMTKNQVS LTCLVKGFYP SDIAVEWESN GQPENNYKTT PPVLDSDGSF
301 FLYSKLTVDK SRWQQGNVFS CSVMHEALHN HYTQKSLSLS PGK
(SEQ ID NO: 413)

[0835] The amino acid sequence of unprocessed ActRIIB(E52D, F82D)-G1Fc is shown below (SEQ ID NO: 414). The signal sequence and linker sequences are indicated by solid underline, and the E52D, F82D substitutions are indicated by double underline. The amino acid sequence of SEQ ID NO: 414 may optionally be provided with the lysine removed from the C-terminus. The G1Fc region may also comprise a mutation to an alanine at position 234 or a mutation to an alanine at position 235, or a combination thereof.

1 MDAMKRGLCC VLLLCGAVFV SPGASGRGEA ETRECIYYNA NWELERTNQS
51 GLERCEGDQD KRLHCYASWR NSSGTIELVK KGCWLDDDNC YDRQECVATE
101 ENPQVYFCCC EGNFCNERFT HLPEAGGPEV TYEPPPTAPT GGGTHTCPPC
151 PAPELLGGPS VFLFPPKPKD TLMISRTPEV TCVVVDVSHE DPEVKFNWYV
201 DGVEVHNAKT KPREEQYNST YRVVSVLTVL HQDWLNGKEY KCKVSNKALP
251 APIEKTISKA KGQPREPQVY TLPPSREEMT KNQVSLTCLV KGFYPSDIAV
301 EWESNGQPEN NYKTTPPVLD SDGSFFLYSK LTVDKSRWQQ GNVFSCSVMH
351 EALHNHYTQK SLSLSPGK (SEQ ID NO: 414)

[0836] This ActRIIB(E52D, F82D)-G1Fc fusion polypeptide is encoded by the following nucleic acid sequence (SEQ ID NO: 415):

1 ATGGATGCAA TGAAGAGAGG GCTCTGCTGT GTGCTGCTGC TGTGTGGAGC
51 AGTCTTCGTT TCGCCCGGCG CCTCTGGGCG TGGGGAGGCT GAGACACGGG
101 AGTGCATCTA CTACAACGCC AACTGGGAGC TGGAGCGCAC CAACCAGAGC
151 GGCCTGGAGC GCTGCGAAGG CGACCAGGAC AAGCGGCTGC ACTGCTACGC
201 CTCCTGGCGC AACAGCTCTG GCACCATCGA GCTCGTGAAG AAGGGCTGCT
251 GGCTAGATGA CGACAACTGC TACGATAGGC AGGAGTGTGT GGCCACTGAG
301 GAGAACCCCC AGGTGTACTT CTGCTGCTGT GAAGGCAACT TCTGCAACGA
351 GCGCTTCACT CATTTGCCAG AGGCTGGGGG CCCGGAAGTC ACGTACGAGC
401 CACCCCCGAC AGCCCCCACC GGTGGTGGAA CTCACACATG CCCACCGTGC
451 CCAGCACCTG AACTCCTGGG GGGACCGTCA GTCTTCCTCT TCCCCCCAAA
501 ACCCAAGGAC ACCCTCATGA TCTCCCGGAC CCCTGAGGTC ACATGCGTGG
551 TGGTGGACGT GAGCCACGAA GACCCTGAGG TCAAGTTCAA CTGGTACGTG
601 GACGGCGTGG AGGTGCATAA TGCCAAGACA AAGCCGCGGG AGGAGCAGTA
651 CAACAGCACG TACCGTGTGG TCAGCGTCCT CACCGTCCTG CACCAGGACT
701 GGCTGAATGG CAAGGAGTAC AAGTGCAAGG TCTCCAACAA AGCCCTCCCA
751 GCCCCCATCG AGAAAACCAT CTCCAAAGCC AAAGGGCAGC CCCGAGAACC
801 ACAGGTGTAC ACCCTGCCCC CATCCCGGGA GGAGATGACC AAGAACCAGG
851 TCAGCCTGAC CTGCCTGGTC AAAGGCTTCT ATCCCAGCGA CATCGCCGTG
901 GAGTGGGAGA GCAATGGGCA GCCGGAGAAC AACTACAAGA CCACGCCTCC
951 CGTGCTGGAC TCCGACGGCT CCTTCTTCCT CTATAGCAAG CTCACCGTGG
1001 ACAAGAGCAG GTGGCAGCAG GGGAACGTCT TCTCATGCTC CGTGATGCAT
1051 GAGGCTCTGC ACAACCACTA CACGCAGAAG AGCCTCTCCC TGTCTCCGGG
1101 TAAA (SEQ ID NO: 415)

[0837] A mature ActRIIB(E52D, F82D)-G1Fc fusion polypeptide (SEQ ID NO: 416) is as follows and may optionally be provided with the lysine removed from the C-terminus. The G1Fc region may also comprise a mutation to an alanine at position 234 or a mutation to an alanine at position 235, or a combination thereof.

1 GRGEAETREC IYYNANWELE RTNQSGLERC EGDQDKRLHC YASWRNSSGT
51 IELVKKGCWL DDDNCYDRQE CVATEENPQV YFCCCEGNFC NERFTHLPEA
101 GGPEVTYEPP PTAPTGGGTH TCPPCPAPEL LGGPSVFLFP PKPKDTLMIS
151 RTPEVTCVVV DVSHEDPEVK FNWYVDGVEV HNAKTKPREE QYNSTYRVVS
201 VLTVLHQDWL NGKEYKCKVS NKALPAPIEK TISKAKGQPR EPQVYTLPPS
251 REEMTKNQVS LTCLVKGFYP SDIAVEWESN GQPENNYKTT PPVLDSDGSF
301 FLYSKLTVDK SRWQQGNVFS CSVMHEALHN HYTQKSLSLS PGK
(SEQ ID NO: 416)

[0838] The amino acid sequence of unprocessed ActRIIB(E52D, F82T)-G1Fc is shown below (SEQ ID NO: 417). The signal sequence and linker sequences are indicated by solid underline, and the E52D, F82T substitutions are indicated by double underline. The amino acid sequence of SEQ ID NO: 417 may optionally be provided with the lysine removed from the C-terminus. The G1Fc region may also comprise a mutation to an alanine at position 234 or a mutation to an alanine at position 235, or a combination thereof.

1 MDAMKRGLCC VLLLCGAVFV SPGASGRGEA ETRECIYYNA NWELERTNQS
51 GLERCEGDQD KRLHCYASWR NSSGTIELVK KGCWLDDTNC YDRQECVATE
101 ENPQVYFCCC EGNFCNERFT HLPEAGGPEV TYEPPPTAPT GGGTHTCPPC
151 PAPELLGGPS VFLFPPKPKD TLMISRTPEV TCVVVDVSHE DPEVKFNWYV
201 DGVEVHNAKT KPREEQYNST YRVVSVLTVL HQDWLNGKEY KCKVSNKALP
251 APIEKTISKA KGQPREPQVY TLPPSREEMT KNQVSLTCLV KGFYPSDIAV
301 EWESNGQPEN NYKTTPPVLD SDGSFFLYSK LTVDKSRWQQ GNVFSCSVMH
351 EALHNHYTQK SLSLSPGK (SEQ ID NO: 417)

[0839] This ActRIIB(E52D, F82T)-G1Fc fusion polypeptide is encoded by the following nucleic acid sequence (SEQ ID NO: 418):

1 ATGGATGCAA TGAAGAGAGG GCTCTGCTGT GTGCTGCTGC TGTGTGGAGC
51 AGTCTTCGTT TCGCCCGGCG CCTCTGGGCG TGGGGAGGCT GAGACACGGG
101 AGTGCATCTA CTACAACGCC AACTGGGAGC TGGAGCGCAC CAACCAGAGC
151 GGCCTGGAGC GCTGCGAAGG CGACCAGGAC AAGCGGCTGC ACTGCTACGC
201 CTCCTGGCGC AACAGCTCTG GCACCATCGA GCTCGTGAAG AAGGGCTGCT
251 GGCTAGATGA CACCAACTGC TACGATAGGC AGGAGTGTGT GGCCACTGAG
301 GAGAACCCCC AGGTGTACTT CTGCTGCTGT GAAGGCAACT TCTGCAACGA
351 GCGCTTCACT CATTTGCCAG AGGCTGGGGG CCCGGAAGTC ACGTACGAGC
401 CACCCCCGAC AGCCCCCACC GGTGGTGGAA CTCACACATG CCCACCGTGC
451 CCAGCACCTG AACTCCTGGG GGGACCGTCA GTCTTCCTCT TCCCCCCAAA
501 ACCCAAGGAC ACCCTCATGA TCTCCCGGAC CCCTGAGGTC ACATGCGTGG
551 TGGTGGACGT GAGCCACGAA GACCCTGAGG TCAAGTTCAA CTGGTACGTG
601 GACGGCGTGG AGGTGCATAA TGCCAAGACA AAGCCGCGGG AGGAGCAGTA
651 CAACAGCACG TACCGTGTGG TCAGCGTCCT CACCGTCCTG CACCAGGACT
701 GGCTGAATGG CAAGGAGTAC AAGTGCAAGG TCTCCAACAA AGCCCTCCCA
751 GCCCCCATCG AGAAAACCAT CTCCAAAGCC AAAGGGCAGC CCCGAGAACC
801 ACAGGTGTAC ACCCTGCCCC CATCCCGGGA GGAGATGACC AAGAACCAGG
851 TCAGCCTGAC CTGCCTGGTC AAAGGCTTCT ATCCCAGCGA CATCGCCGTG
901 GAGTGGGAGA GCAATGGGCA GCCGGAGAAC AACTACAAGA CCACGCCTCC
951 CGTGCTGGAC TCCGACGGCT CCTTCTTCCT CTATAGCAAG CTCACCGTGG
1001 ACAAGAGCAG GTGGCAGCAG GGGAACGTCT TCTCATGCTC CGTGATGCAT
1051 GAGGCTCTGC ACAACCACTA CACGCAGAAG AGCCTCTCCC TGTCTCCGGG
1101 TAAA (SEQ ID NO: 418)

[0840] A mature ActRIIB(E52D, F82T)-G1Fc fusion polypeptide (SEQ ID NO: 419) is as follows and may optionally be provided with the lysine removed from the C-terminus. The G1Fc region may also comprise a mutation to an alanine at position 234 or a mutation to an alanine at position 235, or a combination thereof.

1 GRGEAETREC IYYNANWELE RTNQSGLERC EGDQDKRLHC YASWRNSSGT
51 IELVKKGCWL DDTNCYDRQE CVATEENPQV YFCCCEGNFC NERFTHLPEA
101 GGPEVTYEPP PTAPTGGGTH TCPPCPAPEL LGGPSVFLFP PKPKDTLMIS
151 RTPEVTCVVV DVSHEDPEVK FNWYVDGVEV HNAKTKPREE QYNSTYRVVS
201 VLTVLHQDWL NGKEYKCKVS NKALPAPIEK TISKAKGQPR EPQVYTLPPS
251 REEMTKNQVS LTCLVKGFYP SDIAVEWESN GQPENNYKTT PPVLDSDGSF
301 FLYSKLTVDK SRWQQGNVFS CSVMHEALHN HYTQKSLSLS PGK
(SEQ ID NO: 419)

[0841] The amino acid sequence of unprocessed ActRIIB(L57R, F82D)-G1Fc is shown below (SEQ ID NO: 420). The signal sequence and linker sequences are indicated by solid underline, and the L57R, F82D substitutions are indicated by double underline. The amino acid sequence of SEQ ID NO: 420 may optionally be provided with the lysine removed from the C-terminus. The G1Fc region may also comprise a mutation to an alanine at position 234 or a mutation to an alanine at position 235, or a combination thereof.

1 MDAMKRGLCC VLLLCGAVFV SPGASGRGEA ETRECIYYNA NWELERTNQS
51 GLERCEGEQD KRRHCYASWR NSSGTIELVK KGCWLDDDNC YDRQECVATE
101 ENPQVYFCCC EGNFCNERFT HLPEAGGPEV TYEPPPTAPT GGGTHTCPPC
151 PAPELLGGPS VFLFPPKPKD TLMISRTPEV TCVVVDVSHE DPEVKFNWYV
201 DGVEVHNAKT KPREEQYNST YRVVSVLTVL HQDWLNGKEY KCKVSNKALP
251 APIEKTISKA KGQPREPQVY TLPPSREEMT KNQVSLTCLV KGFYPSDIAV
301 EWESNGQPEN NYKTTPPVLD SDGSFFLYSK LTVDKSRWQQ GNVFSCSVMH
351 EALHNHYTQK SLSLSPGK (SEQ ID NO: 420)

[0842] This ActRIIB(L57R, F82D)-G1Fc fusion polypeptide is encoded by the following nucleic acid sequence (SEQ ID NO: 421):

1 ATGGATGCAA TGAAGAGAGG GCTCTGCTGT GTGCTGCTGC TGTGTGGAGC
51 AGTCTTCGTT TCGCCCGGCG CCTCTGGGCG TGGGGAGGCT GAGACACGGG
101 AGTGCATCTA CTACAACGCC AACTGGGAGC TGGAGCGCAC CAACCAGAGC
151 GGCCTGGAGC GCTGCGAAGG CGAGCAGGAC AAGCGGAGGC ACTGCTACGC
201 CTCCTGGCGC AACAGCTCTG GCACCATCGA GCTCGTGAAG AAGGGCTGCT
251 GGCTAGATGA CGACAACTGC TACGATAGGC AGGAGTGTGT GGCCACTGAG
301 GAGAACCCCC AGGTGTACTT CTGCTGCTGT GAAGGCAACT TCTGCAACGA
351 GCGCTTCACT CATTTGCCAG AGGCTGGGGG CCCGGAAGTC ACGTACGAGC
401 CACCCCCGAC AGCCCCCACC GGTGGTGGAA CTCACACATG CCCACCGTGC
451 CCAGCACCTG AACTCCTGGG GGGACCGTCA GTCTTCCTCT TCCCCCCAAA
501 ACCCAAGGAC ACCCTCATGA TCTCCCGGAC CCCTGAGGTC ACATGCGTGG
551 TGGTGGACGT GAGCCACGAA GACCCTGAGG TCAAGTTCAA CTGGTACGTG
601 GACGGCGTGG AGGTGCATAA TGCCAAGACA AAGCCGCGGG AGGAGCAGTA
651 CAACAGCACG TACCGTGTGG TCAGCGTCCT CACCGTCCTG CACCAGGACT
701 GGCTGAATGG CAAGGAGTAC AAGTGCAAGG TCTCCAACAA AGCCCTCCCA
751 GCCCCCATCG AGAAAACCAT CTCCAAAGCC AAAGGGCAGC CCCGAGAACC
801 ACAGGTGTAC ACCCTGCCCC CATCCCGGGA GGAGATGACC AAGAACCAGG
851 TCAGCCTGAC CTGCCTGGTC AAAGGCTTCT ATCCCAGCGA CATCGCCGTG
901 GAGTGGGAGA GCAATGGGCA GCCGGAGAAC AACTACAAGA CCACGCCTCC
951 CGTGCTGGAC TCCGACGGCT CCTTCTTCCT CTATAGCAAG CTCACCGTGG
1001 ACAAGAGCAG GTGGCAGCAG GGGAACGTCT TCTCATGCTC CGTGATGCAT
1051 GAGGCTCTGC ACAACCACTA CACGCAGAAG AGCCTCTCCC TGTCTCCGGG
1101 TAAA (SEQ ID NO: 421)

[0843] A mature ActRIIB(L57R, F82D)-G1Fc fusion polypeptide (SEQ ID NO:) 422 is as follows and may optionally be provided with the lysine removed from the C-terminus. The G1Fc region may also comprise a mutation to an alanine at position 234 or a mutation to an alanine at position 235, or a combination thereof.

1 GRGEAETREC IYYNANWELE RTNQSGLERC EGEQDKRRHC YASWRNSSGT
51 IELVKKGCWL DDDNCYDRQE CVATEENPQV YFCCCEGNFC NERFTHLPEA
101 GGPEVTYEPP PTAPTGGGTH TCPPCPAPEL LGGPSVFLFP PKPKDTLMIS
151 RTPEVTCVVV DVSHEDPEVK FNWYVDGVEV HNAKTKPREE QYNSTYRVVS
201 VLTVLHQDWL NGKEYKCKVS NKALPAPIEK TISKAKGQPR EPQVYTLPPS
251 REEMTKNQVS LTCLVKGFYP SDIAVEWESN GQPENNYKTT PPVLDSDGSF
301 FLYSKLTVDK SRWQQGNVFS CSVMHEALHN HYTQKSLSLS PGK
(SEQ ID NO: 422)

[0844] The amino acid sequence of unprocessed ActRIIB(L57R, F82S)-G1Fc is shown below (SEQ ID NO: 423). The signal sequence and linker sequences are indicated by solid underline, and the L57R, F82S substitutions are indicated by double underline. The amino acid sequence of SEQ ID NO: 423 may optionally be provided with the lysine removed from the C-terminus. The G1Fc region may also comprise a mutation to an alanine at position 234 or a mutation to an alanine at position 235, or a combination thereof.

1 MDAMKRGLCC VLLLCGAVFV SPGASGRGEA ETRECIYYNA NWELERTNQS
51 GLERCEGEQD KRRHCYASWR NSSGTIELVK KGCWLDDSNC YDRQECVATE
101 ENPQVYFCCC EGNFCNERFT HLPEAGGPEV TYEPPPTAPT GGGTHTCPPC
151 PAPELLGGPS VFLFPPKPKD TLMISRTPEV TCVVVDVSHE DPEVKFNWYV
201 DGVEVHNAKT KPREEQYNST YRVVSVLTVL HQDWLNGKEY KCKVSNKALP
251 APIEKTISKA KGQPREPQVY TLPPSREEMT KNQVSLTCLV KGFYPSDIAV
301 EWESNGQPEN NYKTTPPVLD SDGSFFLYSK LTVDKSRWQQ GNVFSCSVMH
351 EALHNHYTQK SLSLSPGK (SEQ ID NO: 423)

[0845] This ActRIIB(L57R, F82S)-G1Fc fusion polypeptide is encoded by the following nucleic acid sequence (SEQ ID NO: 424):

1 ATGGATGCAA TGAAGAGAGG GCTCTGCTGT GTGCTGCTGC TGTGTGGAGC
51 AGTCTTCGTT TCGCCCGGCG CCTCTGGGCG TGGGGAGGCT GAGACACGGG
101 AGTGCATCTA CTACAACGCC AACTGGGAGC TGGAGCGCAC CAACCAGAGC
151 GGCCTGGAGC GCTGCGAAGG CGAGCAGGAC AAGCGGAGGC ACTGCTACGC
201 CTCCTGGCGC AACAGCTCTG GCACCATCGA GCTCGTGAAG AAGGGCTGCT
251 GGCTAGATGA CTCCAACTGC TACGATAGGC AGGAGTGTGT GGCCACTGAG
301 GAGAACCCCC AGGTGTACTT CTGCTGCTGT GAAGGCAACT TCTGCAACGA
351 GCGCTTCACT CATTTGCCAG AGGCTGGGGG CCCGGAAGTC ACGTACGAGC
401 CACCCCCGAC AGCCCCCACC GGTGGTGGAA CTCACACATG CCCACCGTGC
451 CCAGCACCTG AACTCCTGGG GGGACCGTCA GTCTTCCTCT TCCCCCCAAA
501 ACCCAAGGAC ACCCTCATGA TCTCCCGGAC CCCTGAGGTC ACATGCGTGG
551 TGGTGGACGT GAGCCACGAA GACCCTGAGG TCAAGTTCAA CTGGTACGTG
601 GACGGCGTGG AGGTGCATAA TGCCAAGACA AAGCCGCGGG AGGAGCAGTA
651 CAACAGCACG TACCGTGTGG TCAGCGTCCT CACCGTCCTG CACCAGGACT
701 GGCTGAATGG CAAGGAGTAC AAGTGCAAGG TCTCCAACAA AGCCCTCCCA
751 GCCCCCATCG AGAAAACCAT CTCCAAAGCC AAAGGGCAGC CCCGAGAACC
801 ACAGGTGTAC ACCCTGCCCC CATCCCGGGA GGAGATGACC AAGAACCAGG
851 TCAGCCTGAC CTGCCTGGTC AAAGGCTTCT ATCCCAGCGA CATCGCCGTG
901 GAGTGGGAGA GCAATGGGCA GCCGGAGAAC AACTACAAGA CCACGCCTCC
951 CGTGCTGGAC TCCGACGGCT CCTTCTTCCT CTATAGCAAG CTCACCGTGG
1001 ACAAGAGCAG GTGGCAGCAG GGGAACGTCT TCTCATGCTC CGTGATGCAT
1051 GAGGCTCTGC ACAACCACTA CACGCAGAAG AGCCTCTCCC TGTCTCCGGG
1101 TAAA (SEQ ID NO: 424)

[0846] A mature ActRIIB(L57R, F82S)-G1Fc fusion polypeptide (SEQ ID NO: 425) is as follows and may optionally be provided with the lysine removed from the C-terminus. The G1Fc region may also comprise a mutation to an alanine at position 234 or a mutation to an alanine at position 235, or a combination thereof.

1 GRGEAETREC IYYNANWELE RTNQSGLERC EGEQDKRRHC YASWRNSSGT
51 IELVKKGCWL DDSNCYDRQE CVATEENPQV YFCCCEGNFC NERFTHLPEA
101 GGPEVTYEPP PTAPTGGGTH TCPPCPAPEL LGGPSVFLFP PKPKDTLMIS
151 RTPEVTCVVV DVSHEDPEVK FNWYVDGVEV HNAKTKPREE QYNSTYRVVS
201 VLTVLHQDWL NGKEYKCKVS NKALPAPIEK TISKAKGQPR EPQVYTLPPS
251 REEMTKNQVS LTCLVKGFYP SDIAVEWESN GQPENNYKTT PPVLDSDGSF
301 FLYSKLTVDK SRWQQGNVFS CSVMHEALHN HYTQKSLSLS PGK
(SEQ ID NO: 425)

[0847] The amino acid sequence of unprocessed ActRIIB(L57R, F82T)-G1Fc is shown below (SEQ ID NO: 426). The signal sequence and linker sequences are indicated by solid underline, and the L57R, F82T substitutions are indicated by double underline. The amino acid sequence of SEQ ID NO: 426 may optionally be provided with the lysine removed from the C-terminus. The G1Fc region may also comprise a mutation to an alanine at position 234 or a mutation to an alanine at position 235, or a combination thereof.

1 MDAMKRGLCC VLLLCGAVFV SPGASGRGEA ETRECIYYNA NWELERTNQS
51 GLERCEGEQD KRRHCYASWR NSSGTIELVK KGCWLDDTNC YDRQECVATE
101 ENPQVYFCCC EGNFCNERFT HLPEAGGPEV TYEPPPTAPT GGGTHTCPPC
151 PAPELLGGPS VFLFPPKPKD TLMISRTPEV TCVVVDVSHE DPEVKFNWYV
201 DGVEVHNAKT KPREEQYNST YRVVSVLTVL HQDWLNGKEY KCKVSNKALP
251 APIEKTISKA KGQPREPQVY TLPPSREEMT KNQVSLTCLV KGFYPSDIAV
301 EWESNGQPEN NYKTTPPVLD SDGSFFLYSK LTVDKSRWQQ GNVFSCSVMH
351 EALHNHYTQK SLSLSPGK (SEQ ID NO: 426)

[0848] This ActRIIB(L57R, F82T)-G1Fc fusion polypeptide is encoded by the following nucleic acid sequence (SEQ ID NO: 427):

1 ATGGATGCAA TGAAGAGAGG GCTCTGCTGT GTGCTGCTGC TGTGTGGAGC
51 AGTCTTCGTT TCGCCCGGCG CCTCTGGGCG TGGGGAGGCT GAGACACGGG
101 AGTGCATCTA CTACAACGCC AACTGGGAGC TGGAGCGCAC CAACCAGAGC
151 GGCCTGGAGC GCTGCGAAGG CGAGCAGGAC AAGCGGCGGC ACTGCTACGC
201 CTCCTGGCGC AACAGCTCTG GCACCATCGA GCTCGTGAAG AAGGGCTGCT
251 GGCTAGATGA CACCAACTGC TACGATAGGC AGGAGTGTGT GGCCACTGAG
301 GAGAACCCCC AGGTGTACTT CTGCTGCTGT GAAGGCAACT TCTGCAACGA
351 GCGCTTCACT CATTTGCCAG AGGCTGGGGG CCCGGAAGTC ACGTACGAGC
401 CACCCCCGAC AGCCCCCACC GGTGGTGGAA CTCACACATG CCCACCGTGC
451 CCAGCACCTG AACTCCTGGG GGGACCGTCA GTCTTCCTCT TCCCCCCAAA
501 ACCCAAGGAC ACCCTCATGA TCTCCCGGAC CCCTGAGGTC ACATGCGTGG
551 TGGTGGACGT GAGCCACGAA GACCCTGAGG TCAAGTTCAA CTGGTACGTG
601 GACGGCGTGG AGGTGCATAA TGCCAAGACA AAGCCGCGGG AGGAGCAGTA
651 CAACAGCACG TACCGTGTGG TCAGCGTCCT CACCGTCCTG CACCAGGACT
701 GGCTGAATGG CAAGGAGTAC AAGTGCAAGG TCTCCAACAA AGCCCTCCCA
751 GCCCCCATCG AGAAAACCAT CTCCAAAGCC AAAGGGCAGC CCCGAGAACC
801 ACAGGTGTAC ACCCTGCCCC CATCCCGGGA GGAGATGACC AAGAACCAGG
851 TCAGCCTGAC CTGCCTGGTC AAAGGCTTCT ATCCCAGCGA CATCGCCGTG
901 GAGTGGGAGA GCAATGGGCA GCCGGAGAAC AACTACAAGA CCACGCCTCC
951 CGTGCTGGAC TCCGACGGCT CCTTCTTCCT CTATAGCAAG CTCACCGTGG
1001 ACAAGAGCAG GTGGCAGCAG GGGAACGTCT TCTCATGCTC CGTGATGCAT
1051 GAGGCTCTGC ACAACCACTA CACGCAGAAG AGCCTCTCCC TGTCTCCGGG
1101 TAAA (SEQ ID NO: 427)

[0849] A mature ActRIIB(L57R, F82T)-G1Fc fusion polypeptide (SEQ ID NO: 428) is as follows and may optionally be provided with the lysine removed from the C-terminus. The G1Fc region may also comprise a mutation to an alanine at position 234 or a mutation to an alanine at position 235, or a combination thereof.

1 GRGEAETREC IYYNANWELE RTNQSGLERC EGEQDKRRHC YASWRNSSGT
51 IELVKKGCWL DDTNCYDRQE CVATEENPQV YFCCCEGNFC NERFTHLPEA
101 GGPEVTYEPP PTAPTGGGTH TCPPCPAPEL LGGPSVFLFP PKPKDTLMIS
151 RTPEVTCVVV DVSHEDPEVK FNWYVDGVEV HNAKTKPREE QYNSTYRVVS
201 VLTVLHQDWL NGKEYKCKVS NKALPAPIEK TISKAKGQPR EPQVYTLPPS
251 REEMTKNQVS LTCLVKGFYP SDIAVEWESN GQPENNYKTT PPVLDSDGSF
301 FLYSKLTVDK SRWQQGNVFS CSVMHEALHN HYTQKSLSLS PGK
(SEQ ID NO: 428)

[0850] The amino acid sequence of unprocessed ActRIIB(L79F, F82D)-G1Fc is shown below (SEQ ID NO: 429). The signal sequence and linker sequences are indicated by solid underline, and the L79F, F82D substitution is indicated by double underline. The amino acid sequence of SEQ ID NO: 429 may optionally be provided with the lysine removed from the C-terminus. The G1Fc region may also comprise a mutation to an alanine at position 234 or a mutation to an alanine at position 235, or a combination thereof.

1 MDAMKRGLCC VLLLCGAVFV SPGASGRGEA ETRECIYYNA NWELERTNQS
51 GLERCEGEQD KRLHCYASWR NSSGTIELVK KGCWFDDDNC YDRQECVATE
101 ENPQVYFCCC EGNFCNERFT HLPEAGGPEV TYEPPPTAPT GGGTHTCPPC
151 PAPELLGGPS VFLFPPKPKD TLMISRTPEV TCVVVDVSHE DPEVKFNWYV
201 DGVEVHNAKT KPREEQYNST YRVVSVLTVL HQDWLNGKEY KCKVSNKALP
251 APIEKTISKA KGQPREPQVY TLPPSREEMT KNQVSLTCLV KGFYPSDIAV
301 EWESNGQPEN NYKTTPPVLD SDGSFFLYSK LTVDKSRWQQ GNVFSCSVMH
351 EALHNHYTQK SLSLSPGK (SEQ ID NO: 429)

[0851] This ActRIIB(L79F, F82D)-G1Fc fusion polypeptide is encoded by the following nucleic acid sequence (SEQ ID NO: 430):

1 ATGGATGCAA TGAAGAGAGG GCTCTGCTGT GTGCTGCTGC TGTGTGGAGC
51 AGTCTTCGTT TCGCCCGGCG CCTCTGGGCG TGGGGAGGCT GAGACACGGG
101 AGTGCATCTA CTACAACGCC AACTGGGAGC TGGAGCGCAC CAACCAGAGC
151 GGCCTGGAGC GCTGCGAAGG CGAGCAGGAC AAGCGGCTGC ACTGCTACGC
201 CTCCTGGCGC AACAGCTCTG GCACCATCGA GCTCGTGAAG AAGGGCTGCT
251 GGTTCGATGA CGACAACTGC TACGATAGGC AGGAGTGTGT GGCCACTGAG
301 GAGAACCCCC AGGTGTACTT CTGCTGCTGT GAAGGCAACT TCTGCAACGA
351 GCGCTTCACT CATTTGCCAG AGGCTGGGGG CCCGGAAGTC ACGTACGAGC
401 CACCCCCGAC AGCCCCCACC GGTGGTGGAA CTCACACATG CCCACCGTGC
451 CCAGCACCTG AACTCCTGGG GGGACCGTCA GTCTTCCTCT TCCCCCCAAA
501 ACCCAAGGAC ACCCTCATGA TCTCCCGGAC CCCTGAGGTC ACATGCGTGG
551 TGGTGGACGT GAGCCACGAA GACCCTGAGG TCAAGTTCAA CTGGTACGTG
601 GACGGCGTGG AGGTGCATAA TGCCAAGACA AAGCCGCGGG AGGAGCAGTA
651 CAACAGCACG TACCGTGTGG TCAGCGTCCT CACCGTCCTG CACCAGGACT
701 GGCTGAATGG CAAGGAGTAC AAGTGCAAGG TCTCCAACAA AGCCCTCCCA
751 GCCCCCATCG AGAAAACCAT CTCCAAAGCC AAAGGGCAGC CCCGAGAACC
801 ACAGGTGTAC ACCCTGCCCC CATCCCGGGA GGAGATGACC AAGAACCAGG
851 TCAGCCTGAC CTGCCTGGTC AAAGGCTTCT ATCCCAGCGA CATCGCCGTG
901 GAGTGGGAGA GCAATGGGCA GCCGGAGAAC AACTACAAGA CCACGCCTCC
951 CGTGCTGGAC TCCGACGGCT CCTTCTTCCT CTATAGCAAG CTCACCGTGG
1001 ACAAGAGCAG GTGGCAGCAG GGGAACGTCT TCTCATGCTC CGTGATGCAT
1051 GAGGCTCTGC ACAACCACTA CACGCAGAAG AGCCTCTCCC TGTCTCCGGG
1101 TAAA (SEQ ID NO: 430)

[0852] A mature ActRIIB(L79F, F82D)-G1Fc fusion polypeptide (SEQ ID NO: 431) is as follows and may optionally be provided with the lysine removed from the C-terminus. The G1Fc region may also comprise a mutation to an alanine at position 234 or a mutation to an alanine at position 235, or a combination thereof.

1 GRGEAETREC IYYNANWELE RTNQSGLERC EGEQDKRLHC YASWRNSSGT
51 IELVKKGCWF DDDNCYDRQE CVATEENPQV YFCCCEGNFC NERFTHLPEA
101 GGPEVTYEPP PTAPTGGGTH TCPPCPAPEL LGGPSVFLFP PKPKDTLMIS
151 RTPEVTCVVV DVSHEDPEVK FNWYVDGVEV HNAKTKPREE QYNSTYRVVS
201 VLTVLHQDWL NGKEYKCKVS NKALPAPIEK TISKAKGQPR EPQVYTLPPS
251 REEMTKNQVS LTCLVKGFYP SDIAVEWESN GQPENNYKTT PPVLDSDGSF
301 FLYSKLTVDK SRWQQGNVFS CSVMHEALHN HYTQKSLSLS PGK
(SEQ ID NO: 431)

[0853] The amino acid sequence of unprocessed ActRIIB(L79F, F82T)-G1Fc is shown below (SEQ ID NO: 432). The signal sequence and linker sequences are indicated by solid underline, and the L79F, F82T substitutions are indicated by double underline. The amino acid sequence of SEQ ID NO: 432 may optionally be provided with the lysine removed from the C-terminus. The G1Fc region may also comprise a mutation to an alanine at position 234 or a mutation to an alanine at position 235, or a combination thereof.

1 MDAMKRGLCC VLLLCGAVFV SPGASGRGEA ETRECIYYNA NWELERTNQS
51 GLERCEGEQD KRLHCYASWR NSSGTIELVK KGCWFDDTNC YDRQECVATE
101 ENPQVYFCCC EGNFCNERFT HLPEAGGPEV TYEPPPTAPT GGGTHTCPPC
151 PAPELLGGPS VFLFPPKPKD TLMISRTPEV TCVVVDVSHE DPEVKFNWYV
201 DGVEVHNAKT KPREEQYNST YRVVSVLTVL HQDWLNGKEY KCKVSNKALP
251 APIEKTISKA KGQPREPQVY TLPPSREEMT KNQVSLTCLV KGFYPSDIAV
301 EWESNGQPEN NYKTTPPVLD SDGSFFLYSK LTVDKSRWQQ GNVFSCSVMH
351 EALHNHYTQK SLSLSPGK (SEQ ID NO: 432)

[0854] This ActRIIB(L79F, F82T)-G1Fc fusion polypeptide is encoded by the following nucleic acid sequence (SEQ ID NO: 433):

1 ATGGATGCAA TGAAGAGAGG GCTCTGCTGT GTGCTGCTGC TGTGTGGAGC
51 AGTCTTCGTT TCGCCCGGCG CCTCTGGGCG TGGGGAGGCT GAGACACGGG
101 AGTGCATCTA CTACAACGCC AACTGGGAGC TGGAGCGCAC CAACCAGAGC
151 GGCCTGGAGC GCTGCGAAGG CGAGCAGGAC AAGCGGCTGC ACTGCTACGC
201 CTCCTGGCGC AACAGCTCTG GCACCATCGA GCTCGTGAAG AAGGGCTGCT
251 GGTTCGATGA CACCAACTGC TACGATAGGC AGGAGTGTGT GGCCACTGAG
301 GAGAACCCCC AGGTGTACTT CTGCTGCTGT GAAGGCAACT TCTGCAACGA
351 GCGCTTCACT CATTTGCCAG AGGCTGGGGG CCCGGAAGTC ACGTACGAGC
401 CACCCCCGAC AGCCCCCACC GGTGGTGGAA CTCACACATG CCCACCGTGC
451 CCAGCACCTG AACTCCTGGG GGGACCGTCA GTCTTCCTCT TCCCCCCAAA
501 ACCCAAGGAC ACCCTCATGA TCTCCCGGAC CCCTGAGGTC ACATGCGTGG
551 TGGTGGACGT GAGCCACGAA GACCCTGAGG TCAAGTTCAA CTGGTACGTG
601 GACGGCGTGG AGGTGCATAA TGCCAAGACA AAGCCGCGGG AGGAGCAGTA
651 CAACAGCACG TACCGTGTGG TCAGCGTCCT CACCGTCCTG CACCAGGACT
701 GGCTGAATGG CAAGGAGTAC AAGTGCAAGG TCTCCAACAA AGCCCTCCCA
751 GCCCCCATCG AGAAAACCAT CTCCAAAGCC AAAGGGCAGC CCCGAGAACC
801 ACAGGTGTAC ACCCTGCCCC CATCCCGGGA GGAGATGACC AAGAACCAGG
851 TCAGCCTGAC CTGCCTGGTC AAAGGCTTCT ATCCCAGCGA CATCGCCGTG
901 GAGTGGGAGA GCAATGGGCA GCCGGAGAAC AACTACAAGA CCACGCCTCC
951 CGTGCTGGAC TCCGACGGCT CCTTCTTCCT CTATAGCAAG CTCACCGTGG
1001 ACAAGAGCAG GTGGCAGCAG GGGAACGTCT TCTCATGCTC CGTGATGCAT
1051 GAGGCTCTGC ACAACCACTA CACGCAGAAG AGCCTCTCCC TGTCTCCGGG
1101 TAAA (SEQ ID NO: 433)

[0855] A mature ActRIIB(L79F, F82T)-G1Fc fusion polypeptide (SEQ ID NO: 434) is as follows and may optionally be provided with the lysine removed from the C-terminus. The G1Fc region may also comprise a mutation to an alanine at position 234 or a mutation to an alanine at position 235, or a combination thereof.

1 GRGEAETREC IYYNANWELE RTNQSGLERC EGEQDKRLHC YASWRNSSGT
51 IELVKKGCWF DDTNCYDRQE CVATEENPQV YFCCCEGNFC NERFTHLPEA
101 GGPEVTYEPP PTAPTGGGTH TCPPCPAPEL LGGPSVFLFP PKPKDTLMIS
151 RTPEVTCVVV DVSHEDPEVK FNWYVDGVEV HNAKTKPREE QYNSTYRVVS
201 VLTVLHQDWL NGKEYKCKVS NKALPAPIEK TISKAKGQPR EPQVYTLPPS
251 REEMTKNQVS LTCLVKGFYP SDIAVEWESN GQPENNYKTT PPVLDSDGSF
301 FLYSKLTVDK SRWQQGNVFS CSVMHEALHN HYTQKSLSLS PGK
(SEQ ID NO: 434)

[0856] The amino acid sequence of unprocessed ActRIIB(F82D, N83R)-G1Fc is shown below (SEQ ID NO: 435). The signal sequence and linker sequences are indicated by solid underline, and the F82D, N83R substitutions are indicated by double underline. The amino acid sequence of SEQ ID NO: 435 may optionally be provided with the lysine removed from the C-terminus. The G1Fc region may also comprise a mutation to an alanine at position 234 or a mutation to an alanine at position 235, or a combination thereof.

1 MDAMKRGLCC VLLLCGAVFGV SPASGRGEA ETRECIYYNA NWELERTNQS
51 GLERCEGEQD KRLHCYASWR NSSGTIELVK KGCWLDDDRC YDRQECVATE
101 ENPQVYFCCC EGNFCNERFT HLPEAGGPEV TYEPPPTAPT GGGTHTCPPC
151 PAPELLGGPS VFLFPPKPKD TLMISRTPEV TCVVVDVSHE DPEVKFNWYV
201 DGVEVHNAKT KPREEQYNST YRVVSVLTVL HQDWLNGKEY KCKVSNKALP
251 APIEKTISKA KGQPREPQVY TLPPSREEMT KNQVSLTCLV KGFYPSDIAV
301 EWESNGQPEN NYKTTPPVLD SDGSFFLYSK LTVDKSRWQQ GNVFSCSVMH
351 EALHNHYTQK SLSLSPGK (SEQ ID NO: 435)

[0857] This ActRIIB(F82D, N83R)-G1Fc fusion polypeptide is encoded by the following nucleic acid sequence (SEQ ID NO: 436):

1 ATGGATGCAA TGAAGAGAGG GCTCTGCTGT GTGCTGCTGC TGTGTGGAGC
51 AGTCTTCGTT TCGCCCGGCG CCTCTGGGCG TGGGGAGGCT GAGACACGGG
101 AGTGCATCTA CTACAACGCC AACTGGGAGC TGGAGCGCAC CAACCAGAGC
151 GGCCTGGAGC GCTGCGAAGG CGAGCAGGAC AAGCGGCTGC ACTGCTACGC
201 CTCCTGGCGC AACAGCTCTG GCACCATCGA GCTCGTGAAG AAGGGCTGCT
251 GGCTAGATGA CGACCGGTGC TACGATAGGC AGGAGTGTGT GGCCACTGAG
301 GAGAACCCCC AGGTGTACTT CTGCTGCTGT GAAGGCAACT TCTGCAACGA
351 GCGCTTCACT CATTTGCCAG AGGCTGGGGG CCCGGAAGTC ACGTACGAGC
401 CACCCCCGAC AGCCCCCACC GGTGGTGGAA CTCACACATG CCCACCGTGC
451 CCAGCACCTG AACTCCTGGG GGGACCGTCA GTCTTCCTCT TCCCCCCAAA
501 ACCCAAGGAC ACCCTCATGA TCTCCCGGAC CCCTGAGGTC ACATGCGTGG
551 TGGTGGACGT GAGCCACGAA GACCCTGAGG TCAAGTTCAA CTGGTACGTG
601 GACGGCGTGG AGGTGCATAA TGCCAAGACA AAGCCGCGGG AGGAGCAGTA
651 CAACAGCACG TACCGTGTGG TCAGCGTCCT CACCGTCCTG CACCAGGACT
701 GGCTGAATGG CAAGGAGTAC AAGTGCAAGG TCTCCAACAA AGCCCTCCCA
751 GCCCCCATCG AGAAAACCAT CTCCAAAGCC AAAGGGCAGC CCCGAGAACC
801 ACAGGTGTAC ACCCTGCCCC CATCCCGGGA GGAGATGACC AAGAACCAGG
851 TCAGCCTGAC CTGCCTGGTC AAAGGCTTCT ATCCCAGCGA CATCGCCGTG
901 GAGTGGGAGA GCAATGGGCA GCCGGAGAAC AACTACAAGA CCACGCCTCC
951 CGTGCTGGAC TCCGACGGCT CCTTCTTCCT CTATAGCAAG CTCACCGTGG
1001 ACAAGAGCAG GTGGCAGCAG GGGAACGTCT TCTCATGCTC CGTGATGCAT
1051 GAGGCTCTGC ACAACCACTA CACGCAGAAG AGCCTCTCCC TGTCTCCGGG
1101 TAAA (SEQ ID NO: 436)

[0858] A mature ActRIIB(F82D, N83R)-G1Fc fusion polypeptide (SEQ ID NO: 437) is as follows and may optionally be provided with the lysine removed from the C-terminus. The G1Fc region may also comprise a mutation to an alanine at position 234 or a mutation to an alanine at position 235, or a combination thereof.

1 GRGEAETREC IYYNANWELE RTNQSGLERC EGEQDKRLHC YASWRNSSGT
51 IELVKKGCWL DDDRCYDRQE CVATEENPQV YFCCCEGNFC NERFTHLPEA
101 GGPEVTYEPP PTAPTGGGTH TCPPCPAPEL LGGPSVFLFP PKPKDTLMIS
151 RTPEVTCVVV DVSHEDPEVK FNWYVDGVEV HNAKTKPREE QYNSTYRVVS
201 VLTVLHQDWL NGKEYKCKVS NKALPAPIEK TISKAKGQPR EPQVYTLPPS
251 REEMTKNQVS LTCLVKGFYP SDIAVEWESN GQPENNYKTT PPVLDSDGSF
301 FLYSKLTVDK SRWQQGNVFS CSVMHEALHN HYTQKSLSLS PGK
(SEQ ID NO: 437)

[0859] The amino acid sequence of unprocessed ActRIIB(F82E, N83R)-G1Fc is shown below (SEQ ID NO: 438). The signal sequence and linker sequences are indicated by solid underline, and the F82E, N83R substitutions are indicated by double underline. The amino acid sequence of SEQ ID NO: 438 may optionally be provided with the lysine removed from the C-terminus. The G1Fc region may also comprise a mutation to an alanine at position 234 or a mutation to an alanine at position 235, or a combination thereof.

1 MDAMKRGLCC VLLLCGAVFV SPGASGRGEA ETRECIYYNA NWELERTNQS
51 GLERCEGEQD KRLHCYASWR NSSGTIELVK KGCWLDDERC YDRQECVATE
101 ENPQVYFCCC EGNFCNERFT HLPEAGGPEV TYEPPPTAPT GGGTHTCPPC
151 PAPELLGGPS VFLFPPKPKD TLMISRTPEV TCVVVDVSHE DPEVKFNWYV
201 DGVEVHNAKT KPREEQYNST YRVVSVLTVL HQDWLNGKEY KCKVSNKALP
251 APIEKTISKA KGQPREPQVY TLPPSREEMT KNQVSLTCLV KGFYPSDIAV
301 EWESNGQPEN NYKTTPPVLD SDGSFFLYSK LTVDKSRWQQ GNVFSCSVMH
351 EALHNHYTQK SLSLSPGK (SEQ ID NO: 438)

[0860] This ActRIIB(F82E, N83R)-G1Fc fusion polypeptide is encoded by the following nucleic acid sequence (SEQ ID NO: 439):

1 ATGGATGCAA TGAAGAGAGG GCTCTGCTGT GTGCTGCTGC TGTGTGGAGC
51 AGTCTTCGTT TCGCCCGGCG CCTCTGGGCG TGGGGAGGCT GAGACACGGG
101 AGTGCATCTA CTACAACGCC AACTGGGAGC TGGAGCGCAC CAACCAGAGC
151 GGCCTGGAGC GCTGCGAAGG CGAGCAGGAC AAGCGGCTGC ACTGCTACGC
201 CTCCTGGCGC AACAGCTCTG GCACCATCGA GCTCGTGAAG AAGGGCTGCT
251 GGCTAGATGA CGAGCGGTGC TACGATAGGC AGGAGTGTGT GGCCACTGAG
301 GAGAACCCCC AGGTGTACTT CTGCTGCTGT GAAGGCAACT TCTGCAACGA
351 GCGCTTCACT CATTTGCCAG AGGCTGGGGG CCCGGAAGTC ACGTACGAGC
401 CACCCCCGAC AGCCCCCACC GGTGGTGGAA CTCACACATG CCCACCGTGC
451 CCAGCACCTG AACTCCTGGG GGGACCGTCA GTCTTCCTCT TCCCCCCAAA
501 ACCCAAGGAC ACCCTCATGA TCTCCCGGAC CCCTGAGGTC ACATGCGTGG
551 TGGTGGACGT GAGCCACGAA GACCCTGAGG TCAAGTTCAA CTGGTACGTG
601 GACGGCGTGG AGGTGCATAA TGCCAAGACA AAGCCGCGGG AGGAGCAGTA
651 CAACAGCACG TACCGTGTGG TCAGCGTCCT CACCGTCCTG CACCAGGACT
701 GGCTGAATGG CAAGGAGTAC AAGTGCAAGG TCTCCAACAA AGCCCTCCCA
751 GCCCCCATCG AGAAAACCAT CTCCAAAGCC AAAGGGCAGC CCCGAGAACC
801 ACAGGTGTAC ACCCTGCCCC CATCCCGGGA GGAGATGACC AAGAACCAGG
851 TCAGCCTGAC CTGCCTGGTC AAAGGCTTCT ATCCCAGCGA CATCGCCGTG
901 GAGTGGGAGA GCAATGGGCA GCCGGAGAAC AACTACAAGA CCACGCCTCC
951 CGTGCTGGAC TCCGACGGCT CCTTCTTCCT CTATAGCAAG CTCACCGTGG
1001 ACAAGAGCAG GTGGCAGCAG GGGAACGTCT TCTCATGCTC CGTGATGCAT
1051 GAGGCTCTGC ACAACCACTA CACGCAGAAG AGCCTCTCCC TGTCTCCGGG
1101 TAAA (SEQ ID NO: 439)

[0861] A mature ActRIIB(F82E, N83R)-G1Fc fusion polypeptide (SEQ ID NO: 440) is as follows and may optionally be provided with the lysine removed from the C-terminus. The G1Fc region may also comprise a mutation to an alanine at position 234 or a mutation to an alanine at position 235, or a combination thereof.

1 GRGEAETREC IYYNANWELE RTNQSGLERC EGEQDKRLHC YASWRNSSGT
51 IELVKKGCWL DDERCYDRQE CVATEENPQV YFCCCEGNFC NERFTHLPEA
101 GGPEVTYEPP PTAPTGGGTH TCPPCPAPEL LGGPSVFLFP PKPKDTLMIS
151 RTPEVTCVVV DVSHEDPEVK FNWYVDGVEV HNAKTKPREE QYNSTYRVVS
201 VLTVLHQDWL NGKEYKCKVS NKALPAPIEK TISKAKGQPR EPQVYTLPPS
251 REEMTKNQVS LTCLVKGFYP SDIAVEWESN GQPENNYKTT PPVLDSDGSF
301 FLYSKLTVDK SRWQQGNVFS CSVMHEALHN HYTQKSLSLS PGK
(SEQ ID NO: 440)

[0862] The amino acid sequence of unprocessed ActRIIB(F82S, N83R)-G1Fc is shown below (SEQ ID NO: 441). The signal sequence and linker sequences are indicated by solid underline, and the F82S, N83R substitutions are indicated by double underline. The amino acid sequence of SEQ ID NO: 441 may optionally be provided with the lysine removed from the C-terminus. The G1Fc region may also comprise a mutation to an alanine at position 234 or a mutation to an alanine at position 235, or a combination thereof.

1 MDAMKRGLCC VLLLCGAVFV SPGASGRGEA ETRECIYYNA NWELERTNQS
51 GLERCEGEQD KRLHCYASWR NSSGTIELVK KGCWLDDSRC YDRQECVATE
101 ENPQVYFCCC EGNFCNERFT HLPEAGGPEV TYEPPPTAPT GGGTHTCPPC
151 PAPELLGGPS VFLFPPKPKD TLMISRTPEV TCVVVDVSHE DPEVKFNWYV
201 DGVEVHNAKT KPREEQYNST YRVVSVLTVL HQDWLNGKEY KCKVSNKALP
251 APIEKTISKA KGQPREPQVY TLPPSREEMT KNQVSLTCLV KGFYPSDIAV
301 EWESNGQPEN NYKTTPPVLD SDGSFFLYSK LTVDKSRWQQ GNVFSCSVMH
351 EALHNHYTQK SLSLSPGK (SEQ ID NO: 441)

[0863] This ActRIIB(F82S, N83R)-G1Fc fusion polypeptide is encoded by the following nucleic acid sequence (SEQ ID NO: 442):

1 ATGGATGCAA TGAAGAGAGG GCTCTGCTGT GTGCTGCTGC TGTGTGGAGC
51 AGTCTTCGTT TCGCCCGGCG CCTCTGGGCG TGGGGAGGCT GAGACACGGG
101 AGTGCATCTA CTACAACGCC AACTGGGAGC TGGAGCGCAC CAACCAGAGC
151 GGCCTGGAGC GCTGCGAAGG CGAGCAGGAC AAGCGGCTGC ACTGCTACGC
201 CTCCTGGCGC AACAGCTCTG GCACCATCGA GCTCGTGAAG AAGGGCTGCT
251 GGCTAGATGA CTCCCGGTGC TACGATAGGC AGGAGTGTGT GGCCACTGAG
301 GAGAACCCCC AGGTGTACTT CTGCTGCTGT GAAGGCAACT TCTGCAACGA
351 GCGCTTCACT CATTTGCCAG AGGCTGGGGG CCCGGAAGTC ACGTACGAGC
401 CACCCCCGAC AGCCCCCACC GGTGGTGGAA CTCACACATG CCCACCGTGC
451 CCAGCACCTG AACTCCTGGG GGGACCGTCA GTCTTCCTCT TCCCCCCAAA
501 ACCCAAGGAC ACCCTCATGA TCTCCCGGAC CCCTGAGGTC ACATGCGTGG
551 TGGTGGACGT GAGCCACGAA GACCCTGAGG TCAAGTTCAA CTGGTACGTG
601 GACGGCGTGG AGGTGCATAA TGCCAAGACA AAGCCGCGGG AGGAGCAGTA
651 CAACAGCACG TACCGTGTGG TCAGCGTCCT CACCGTCCTG CACCAGGACT
701 GGCTGAATGG CAAGGAGTAC AAGTGCAAGG TCTCCAACAA AGCCCTCCCA
751 GCCCCCATCG AGAAAACCAT CTCCAAAGCC AAAGGGCAGC CCCGAGAACC
801 ACAGGTGTAC ACCCTGCCCC CATCCCGGGA GGAGATGACC AAGAACCAGG
851 TCAGCCTGAC CTGCCTGGTC AAAGGCTTCT ATCCCAGCGA CATCGCCGTG
901 GAGTGGGAGA GCAATGGGCA GCCGGAGAAC AACTACAAGA CCACGCCTCC
951 CGTGCTGGAC TCCGACGGCT CCTTCTTCCT CTATAGCAAG CTCACCGTGG
1001 ACAAGAGCAG GTGGCAGCAG GGGAACGTCT TCTCATGCTC CGTGATGCAT
1051 GAGGCTCTGC ACAACCACTA CACGCAGAAG AGCCTCTCCC TGTCTCCGGG
1101 TAAA (SEQ ID NO: 442)

[0864] A mature ActRIIB(F82S, N83R)-G1Fc fusion polypeptide (SEQ ID NO: 443) is as follows and may optionally be provided with the lysine removed from the C-terminus. The G1Fc region may also comprise a mutation to an alanine at position 234 or a mutation to an alanine at position 235, or a combination thereof.

1 GRGEAETREC IYYNANWELE RTNQSGLERC EGEQDKRLHC YASWRNSSGT
51 IELVKKGCWL DDSRCYDRQE CVATEENPQV YFCCCEGNFC NERFTHLPEA
101 GGPEVTYEPP PTAPTGGGTH TCPPCPAPEL LGGPSVFLFP PKPKDTLMIS
151 RTPEVTCVVV DVSHEDPEVK FNWYVDGVEV HNAKTKPREE QYNSTYRVVS
201 VLTVLHQDWL NGKEYKCKVS NKALPAPIEK TISKAKGQPR EPQVYTLPPS
251 REEMTKNQVS LTCLVKGFYP SDIAVEWESN GQPENNYKTT PPVLDSDGSF
301 FLYSKLTVDK SRWQQGNVFS CSVMHEALHN HYTQKSLSLS PGK
(SEQ ID NO: 443)

[0865] The amino acid sequence of unprocessed ActRIIB(F82W, N83A)-G1Fc is shown below (SEQ ID NO: 444). The signal sequence and linker sequences are indicated by solid underline, and the F82W N83A substitutions are indicated by double underline. The amino acid sequence of SEQ ID NO: 444 may optionally be provided with the lysine removed from the C-terminus. The G1Fc region may also comprise a mutation to an alanine at position 234 or a mutation to an alanine at position 235, or a combination thereof.

1 MDAMKRGLCC VLLLCGAVFV SPGASGRGEA ETRECIYYNA NWELERTNQS
51 GLERCEGEQD KRLHCYASWR NSSGTIELVK KGCWLDDWAC YDRQECVATE
101 ENPQVYFCCC EGNFCNERFT HLPEAGGPEV TYEPPPTAPT GGGTHTCPPC
151 PAPELLGGPS VFLFPPKPKD TLMISRTPEV TCVVVDVSHE DPEVKFNWYV
201 DGVEVHNAKT KPREEQYNST YRVVSVLTVL HQDWLNGKEY KCKVSNKALP
251 APIEKTISKA KGQPREPQVY TLPPSREEMT KNQVSLTCLV KGFYPSDIAV
301 EWESNGQPEN NYKTTPPVLD SDGSFFLYSK LTVDKSRWQQ GNVFSCSVMH
351 EALHNHYTQK SLSLSPGK (SEQ ID NO: 444)

[0866] This ActRIIB(F82W, N83A)-G1Fc fusion polypeptide is encoded by the following nucleic acid sequence (SEQ ID NO: 445):

1 ATGGATGCAA TGAAGAGAGG GCTCTGCTGT GTGCTGCTGC TGTGTGGAGC
51 AGTCTTCGTT TCGCCCGGCG CCTCTGGGCG TGGGGAGGCT GAGACACGGG
101 AGTGCATCTA CTACAACGCC AACTGGGAGC TGGAGCGCAC CAACCAGAGC
151 GGCCTGGAGC GCTGCGAAGG CGAGCAGGAC AAGCGGCTGC ACTGCTACGC
201 CTCCTGGCGC AACAGCTCTG GCACCATCGA GCTCGTGAAG AAGGGCTGCT
251 GGCTAGATGA CTGGGCCTGC TACGATAGGC AGGAGTGTGT GGCCACTGAG
301 GAGAACCCCC AGGTGTACTT CTGCTGCTGT GAAGGCAACT TCTGCAACGA
351 GCGCTTCACT CATTTGCCAG AGGCTGGGGG CCCGGAAGTC ACGTACGAGC
401 CACCCCCGAC AGCCCCCACC GGTGGTGGAA CTCACACATG CCCACCGTGC
451 CCAGCACCTG AACTCCTGGG GGGACCGTCA GTCTTCCTCT TCCCCCCAAA
501 ACCCAAGGAC ACCCTCATGA TCTCCCGGAC CCCTGAGGTC ACATGCGTGG
551 TGGTGGACGT GAGCCACGAA GACCCTGAGG TCAAGTTCAA CTGGTACGTG
601 GACGGCGTGG AGGTGCATAA TGCCAAGACA AAGCCGCGGG AGGAGCAGTA
651 CAACAGCACG TACCGTGTGG TCAGCGTCCT CACCGTCCTG CACCAGGACT
701 GGCTGAATGG CAAGGAGTAC AAGTGCAAGG TCTCCAACAA AGCCCTCCCA
751 GCCCCCATCG AGAAAACCAT CTCCAAAGCC AAAGGGCAGC CCCGAGAACC
801 ACAGGTGTAC ACCCTGCCCC CATCCCGGGA GGAGATGACC AAGAACCAGG
851 TCAGCCTGAC CTGCCTGGTC AAAGGCTTCT ATCCCAGCGA CATCGCCGTG
901 GAGTGGGAGA GCAATGGGCA GCCGGAGAAC AACTACAAGA CCACGCCTCC
951 CGTGCTGGAC TCCGACGGCT CCTTCTTCCT CTATAGCAAG CTCACCGTGG
1001 ACAAGAGCAG GTGGCAGCAG GGGAACGTCT TCTCATGCTC CGTGATGCAT
1051 GAGGCTCTGC ACAACCACTA CACGCAGAAG AGCCTCTCCC TGTCTCCGGG
1101 TAAA (SEQ ID NO: 445)

[0867] A mature ActRIIB(F82W, N83A)-G1Fc fusion polypeptide (SEQ ID NO: 446) is as follows and may optionally be provided with the lysine removed from the C-terminus. The G1Fc region may also comprise a mutation to an alanine at position 234 or a mutation to an alanine at position 235, or a combination thereof.

1 GRGEAETREC IYYNANWELE RTNQSGLERC EGEQDKRLHC YASWRNSSGT
51 IELVKKGCWL DDWACYDRQE CVATEENPQV YFCCCEGNFC NERFTHLPEA
101 GGPEVTYEPP PTAPTGGGTH TCPPCPAPEL LGGPSVFLFP PKPKDTLMIS
151 RTPEVTCVVV DVSHEDPEVK FNWYVDGVEV HNAKTKPREE QYNSTYRVVS
201 VLTVLHQDWL NGKEYKCKVS NKALPAPIEK TISKAKGQPR EPQVYTLPPS
251 REEMTKNQVS LTCLVKGFYP SDIAVEWESN GQPENNYKTT PPVLDSDGSF
301 FLYSKLTVDK SRWQQGNVFS CSVMHEALHN HYTQKSLSLS PGK
(SEQ ID NO: 446)

[0868] The amino acid sequence of unprocessed ActRIIB(F82I, E94K)-G1Fc is shown below (SEQ ID NO: 447). The signal sequence and linker sequences are indicated by solid underline, and the F82I, E94K substitutions are indicated by double underline. The amino acid sequence of SEQ ID NO: 447 may optionally be provided with the lysine removed from the C-terminus. The G1Fc region may also comprise a mutation to an alanine at position 234 or a mutation to an alanine at position 235, or a combination thereof.

1 MDAMKRGLCC VLLLCGAVFV SPGASGRGEA ETRECIYYNA NWELERTNQS
51 GLERCEGEQD KRLHCYASWR NSSGTIELVK KGCWLDDINC YDRQECVATK
101 ENPQVYFCCC EGNFCNERFT HLPEAGGPEV TYEPPPTAPT GGGTHTCPPC
151 PAPELLGGPS VFLFPPKPKD TLMISRTPEV TCVVVDVSHE DPEVKFNWYV
201 DGVEVHNAKT KPREEQYNST YRVVSVLTVL HQDWLNGKEY KCKVSNKALP
251 APIEKTISKA KGQPREPQVY TLPPSREEMT KNQVSLTCLV KGFYPSDIAV
301 EWESNGQPEN NYKTTPPVLD SDGSFFLYSK LTVDKSRWQQ GNVFSCSVMH
351 EALHNHYTQK SLSLSPGK (SEQ ID NO: 447)

[0869] This ActRIIB(F82I, E94K)-G1Fc fusion polypeptide is encoded by the following nucleic acid sequence (SEQ ID NO: 448):

1 ATGGATGCAA TGAAGAGAGG GCTCTGCTGT GTGCTGCTGC TGTGTGGAGC
51 AGTCTTCGTT TCGCCCGGCG CCTCTGGGCG TGGGGAGGCT GAGACACGGG
101 AGTGCATCTA CTACAACGCC AACTGGGAGC TGGAGCGCAC CAACCAGAGC
151 GGCCTGGAGC GCTGCGAAGG CGAGCAGGAC AAGCGGCTGC ACTGCTACGC
201 CTCCTGGCGC AACAGCTCTG GCACCATCGA GCTCGTGAAG AAGGGCTGCT
251 GGCTAGATGA CATCAACTGC TACGATAGGC AGGAGTGTGT GGCCACTAAG
301 GAGAACCCCC AGGTGTACTT CTGCTGCTGT GAAGGCAACT TCTGCAACGA
351 GCGCTTCACT CATTTGCCAG AGGCTGGGGG CCCGGAAGTC ACGTACGAGC
401 CACCCCCGAC AGCCCCCACC GGTGGTGGAA CTCACACATG CCCACCGTGC
451 CCAGCACCTG AACTCCTGGG GGGACCGTCA GTCTTCCTCT TCCCCCCAAA
501 ACCCAAGGAC ACCCTCATGA TCTCCCGGAC CCCTGAGGTC ACATGCGTGG
551 TGGTGGACGT GAGCCACGAA GACCCTGAGG TCAAGTTCAA CTGGTACGTG
601 GACGGCGTGG AGGTGCATAA TGCCAAGACA AAGCCGCGGG AGGAGCAGTA
651 CAACAGCACG TACCGTGTGG TCAGCGTCCT CACCGTCCTG CACCAGGACT
701 GGCTGAATGG CAAGGAGTAC AAGTGCAAGG TCTCCAACAA AGCCCTCCCA
751 GCCCCCATCG AGAAAACCAT CTCCAAAGCC AAAGGGCAGC CCCGAGAACC
801 ACAGGTGTAC ACCCTGCCCC CATCCCGGGA GGAGATGACC AAGAACCAGG
851 TCAGCCTGAC CTGCCTGGTC AAAGGCTTCT ATCCCAGCGA CATCGCCGTG
901 GAGTGGGAGA GCAATGGGCA GCCGGAGAAC AACTACAAGA CCACGCCTCC
951 CGTGCTGGAC TCCGACGGCT CCTTCTTCCT CTATAGCAAG CTCACCGTGG
1001 ACAAGAGCAG GTGGCAGCAG GGGAACGTCT TCTCATGCTC CGTGATGCAT
1051 GAGGCTCTGC ACAACCACTA CACGCAGAAG AGCCTCTCCC TGTCTCCGGG
1101 TAAA (SEQ ID NO: 448)

[0870] A mature ActRIIB(F82I, E94K)-G1Fc fusion polypeptide (SEQ ID NO: 449) is as follows and may optionally be provided with the lysine removed from the C-terminus. The G1Fc region may also comprise a mutation to an alanine at position 234 or a mutation to an alanine at position 235, or a combination thereof.

1 GRGEAETREC IYYNANWELE RTNQSGLERC EGEQDKRLHC YASWRNSSGT
51 IELVKKGCWL DDINCYDRQE CVATKENPQV YFCCCEGNFC NERFTHLPEA
101 GGPEVTYEPP PTAPTGGGTH TCPPCPAPEL LGGPSVFLFP PKPKDTLMIS
151 RTPEVTCVVV DVSHEDPEVK FNWYVDGVEV HNAKTKPREE QYNSTYRVVS
201 VLTVLHQDWL NGKEYKCKVS NKALPAPIEK TISKAKGQPR EPQVYTLPPS
251 REEMTKNQVS LTCLVKGFYP SDIAVEWESN GQPENNYKTT PPVLDSDGSF
301 FLYSKLTVDK SRWQQGNVFS CSVMHEALHN HYTQKSLSLS PGK
(SEQ ID NO: 449)

[0871] The amino acid sequence of unprocessed ActRIIB(E50L, F82D, N83R)-G1Fc is shown below (SEQ ID NO: 450). The signal sequence and linker sequences are indicated by solid underline, and the E50L, F82D, N83R substitutions are indicated by double underline. The amino acid sequence of SEQ ID NO: 450 may optionally be provided with the lysine removed from the C-terminus. The G1Fc region may also comprise a mutation to an alanine at position 234 or a mutation to an alanine at position 235, or a combination thereof.

1 MDAMKRGLCC VLLLCGAVFV SPGASGRGEA ETRECIYYNA NWELERTNQS
51 GLERCLGEQD KRLHCYASWR NSSGTIELVK KGCWLDDDRC YDRQECVATE
101 ENPQVYFCCC EGNFCNERFT HLPEAGGPEV TYEPPPTAPT GGGTHTCPPC
151 PAPELLGGPS VFLFPPKPKD TLMISRTPEV TCVVVDVSHE DPEVKFNWYV
201 DGVEVHNAKT KPREEQYNST YRVVSVLTVL HQDWLNGKEY KCKVSNKALP
251 APIEKTISKA KGQPREPQVY TLPPSREEMT KNQVSLTCLV KGFYPSDIAV
301 EWESNGQPEN NYKTTPPVLD SDGSFFLYSK LTVDKSRWQQ GNVFSCSVMH
351 EALHNHYTQK SLSLSPGK (SEQ ID NO: 450)

[0872] This ActRIIB(E50L, F82D, N83R)-G1Fc fusion polypeptide is encoded by the following nucleic acid sequence (SEQ ID NO: 451):

1 ATGGATGCAA TGAAGAGAGG GCTCTGCTGT GTGCTGCTGC TGTGTGGAGC
51 AGTCTTCGTT TCGCCCGGCG CCTCTGGGCG TGGGGAGGCT GAGACACGGG
101 AGTGCATCTA CTACAACGCC AACTGGGAGC TGGAGCGCAC CAACCAGAGC
151 GGCCTGGAGC GCTGCCTGGG CGAGCAGGAC AAGCGGCTGC ACTGCTACGC
201 CTCCTGGCGC AACAGCTCTG GCACCATCGA GCTCGTGAAG AAGGGCTGCT
251 GGCTAGATGA CGACCGGTGC TACGATAGGC AGGAGTGTGT GGCCACTGAG
301 GAGAACCCCC AGGTGTACTT CTGCTGCTGT GAAGGCAACT TCTGCAACGA
351 GCGCTTCACT CATTTGCCAG AGGCTGGGGG CCCGGAAGTC ACGTACGAGC
401 CACCCCCGAC AGCCCCCACC GGTGGTGGAA CTCACACATG CCCACCGTGC
451 CCAGCACCTG AACTCCTGGG GGGACCGTCA GTCTTCCTCT TCCCCCCAAA
501 ACCCAAGGAC ACCCTCATGA TCTCCCGGAC CCCTGAGGTC ACATGCGTGG
551 TGGTGGACGT GAGCCACGAA GACCCTGAGG TCAAGTTCAA CTGGTACGTG
601 GACGGCGTGG AGGTGCATAA TGCCAAGACA AAGCCGCGGG AGGAGCAGTA
651 CAACAGCACG TACCGTGTGG TCAGCGTCCT CACCGTCCTG CACCAGGACT
701 GGCTGAATGG CAAGGAGTAC AAGTGCAAGG TCTCCAACAA AGCCCTCCCA
751 GCCCCCATCG AGAAAACCAT CTCCAAAGCC AAAGGGCAGC CCCGAGAACC
801 ACAGGTGTAC ACCCTGCCCC CATCCCGGGA GGAGATGACC AAGAACCAGG
851 TCAGCCTGAC CTGCCTGGTC AAAGGCTTCT ATCCCAGCGA CATCGCCGTG
901 GAGTGGGAGA GCAATGGGCA GCCGGAGAAC AACTACAAGA CCACGCCTCC
951 CGTGCTGGAC TCCGACGGCT CCTTCTTCCT CTATAGCAAG CTCACCGTGG
1001 ACAAGAGCAG GTGGCAGCAG GGGAACGTCT TCTCATGCTC CGTGATGCAT
1051 GAGGCTCTGC ACAACCACTA CACGCAGAAG AGCCTCTCCC TGTCTCCGGG
1101 TAAA (SEQ ID NO: 451)

[0873] A mature ActRIIB(E50L, F82D, N83R)-G1Fc fusion polypeptide (SEQ ID NO: 452) is as follows and may optionally be provided with the lysine removed from the C-terminus. The G1Fc region may also comprise a mutation to an alanine at position 234 or a mutation to an alanine at position 235, or a combination thereof.

1 GRGEAETREC IYYNANWELE RTNQSGLERC LGEQDKRLHC YASWRNSSGT
51 IELVKKGCWL DDDRCYDRQE CVATEENPQV YFCCCEGNFC NERFTHLPEA
101 GGPEVTYEPP PTAPTGGGTH TCPPCPAPEL LGGPSVFLFP PKPKDTLMIS
151 RTPEVTCVVV DVSHEDPEVK FNWYVDGVEV HNAKTKPREE QYNSTYRVVS
201 VLTVLHQDWL NGKEYKCKVS NKALPAPIEK TISKAKGQPR EPQVYTLPPS
251 REEMTKNQVS LTCLVKGFYP SDIAVEWESN GQPENNYKTT PPVLDSDGSF
301 FLYSKLTVDK SRWQQGNVFS CSVMHEALHN HYTQKSLSLS PGK
(SEQ ID NO: 452)

[0874] The amino acid sequence of unprocessed ActRIIB(E52D, F82D, N83R)-G1Fc is shown below (SEQ ID NO: 453). The signal sequence and linker sequences are indicated by solid underline, and the E52D, F82D, N83R substitutions are indicated by double underline. The amino acid sequence of SEQ ID NO: 453 may optionally be provided with the lysine removed from the C-terminus. The G1Fc region may also comprise a mutation to an alanine at position 234 or a mutation to an alanine at position 235, or a combination thereof.

1 MDAMKRGLCC VLLLCGAVFV SPGASGRGEA ETRECIYYNA NWELERTNQS
51 GLERCEGDQD KRLHCYASWR NSSGTIELVK KGCWLDDDRC YDRQECVATE
101 ENPQVYFCCC EGNFCNERFT HLPEAGGPEV TYEPPPTAPT GGGTHTCPPC
151 PAPELLGGPS VFLFPPKPKD TLMISRTPEV TCVVVDVSHE DPEVKFNWYV
201 DGVEVHNAKT KPREEQYNST YRVVSVLTVL HQDWLNGKEY KCKVSNKALP
251 APIEKTISKA KGQPREPQVY TLPPSREEMT KNQVSLTCLV KGFYPSDIAV
301 EWESNGQPEN NYKTTPPVLD SDGSFFLYSK LTVDKSRWQQ GNVFSCSVMH
351 EALHNHYTQK SLSLSPGK (SEQ ID NO: 453)

[0875] This ActRIIB(E52D, F82D, N83R)-G1Fc fusion polypeptide is encoded by the following nucleic acid sequence (SEQ ID NO: 454):

1 ATGGATGCAA TGAAGAGAGG GCTCTGCTGT GTGCTGCTGC TGTGTGGAGC
51 AGTCTTCGTT TCGCCCGGCG CCTCTGGGCG TGGGGAGGCT GAGACACGGG
101 AGTGCATCTA CTACAACGCC AACTGGGAGC TGGAGCGCAC CAACCAGAGC
151 GGCCTGGAGC GCTGCGAAGG CGACCAGGAC AAGCGGCTGC ACTGCTACGC
201 CTCCTGGCGC AACAGCTCTG GCACCATCGA GCTCGTGAAG AAGGGCTGCT
251 GGCTAGATGA CGACCGTTGC TACGATAGGC AGGAGTGTGT GGCCACTGAG
301 GAGAACCCCC AGGTGTACTT CTGCTGCTGT GAAGGCAACT TCTGCAACGA
351 GCGCTTCACT CATTTGCCAG AGGCTGGGGG CCCGGAAGTC ACGTACGAGC
401 CACCCCCGAC AGCCCCCACC GGTGGTGGAA CTCACACATG CCCACCGTGC
451 CCAGCACCTG AACTCCTGGG GGGACCGTCA GTCTTCCTCT TCCCCCCAAA
501 ACCCAAGGAC ACCCTCATGA TCTCCCGGAC CCCTGAGGTC ACATGCGTGG
551 TGGTGGACGT GAGCCACGAA GACCCTGAGG TCAAGTTCAA CTGGTACGTG
601 GACGGCGTGG AGGTGCATAA TGCCAAGACA AAGCCGCGGG AGGAGCAGTA
651 CAACAGCACG TACCGTGTGG TCAGCGTCCT CACCGTCCTG CACCAGGACT
701 GGCTGAATGG CAAGGAGTAC AAGTGCAAGG TCTCCAACAA AGCCCTCCCA
751 GCCCCCATCG AGAAAACCAT CTCCAAAGCC AAAGGGCAGC CCCGAGAACC
801 ACAGGTGTAC ACCCTGCCCC CATCCCGGGA GGAGATGACC AAGAACCAGG
851 TCAGCCTGAC CTGCCTGGTC AAAGGCTTCT ATCCCAGCGA CATCGCCGTG
901 GAGTGGGAGA GCAATGGGCA GCCGGAGAAC AACTACAAGA CCACGCCTCC
951 CGTGCTGGAC TCCGACGGCT CCTTCTTCCT CTATAGCAAG CTCACCGTGG
1001 ACAAGAGCAG GTGGCAGCAG GGGAACGTCT TCTCATGCTC CGTGATGCAT
1051 GAGGCTCTGC ACAACCACTA CACGCAGAAG AGCCTCTCCC TGTCTCCGGG
1101 TAAA (SEQ ID NO: 454)

[0876] A mature ActRIIB(E52D, F82D, N83R)-G1Fc fusion polypeptide (SEQ ID NO: 455) is as follows and may optionally be provided with the lysine removed from the C-terminus. The G1Fc region may also comprise a mutation to an alanine at position 234 or a mutation to an alanine at position 235, or a combination thereof.

1 GRGEAETREC IYYNANWELE RTNQSGLERC EGDQDKRLHC YASWRNSSGT
51 IELVKKGCWL DDDRCYDRQE CVATEENPQV YFCCCEGNFC NERFTHLPEA
101 GGPEVTYEPP PTAPTGGGTH TCPPCPAPEL LGGPSVFLFP PKPKDTLMIS
151 RTPEVTCVVV DVSHEDPEVK FNWYVDGVEV HNAKTKPREE QYNSTYRVVS
201 VLTVLHQDWL NGKEYKCKVS NKALPAPIEK TISKAKGQPR EPQVYTLPPS
251 REEMTKNQVS LTCLVKGFYP SDIAVEWESN GQPENNYKTT PPVLDSDGSF
301 FLYSKLTVDK SRWQQGNVFS CSVMHEALHN HYTQKSLSLS PGK
(SEQ ID NO: 455)

[0877] The amino acid sequence of unprocessed ActRIIB(E52D, F82E, N83R)-G1Fc is shown below (SEQ ID NO: 456). The signal sequence and linker sequences are indicated by solid underline, and the E52D, F82E, N83R substitutions are indicated by double underline. The amino acid sequence of SEQ ID NO: 456 may optionally be provided with the lysine removed from the C-terminus. The G1Fc region may also comprise a mutation to an alanine at position 234 or a mutation to an alanine at position 235, or a combination thereof.

1 MDAMKRGLCC VLLLCGAVFV SPGASGRGEA ETRECIYYNA NWELERTNQS
51 GLERCEGDQD KRLHCYASWR NSSGTIELVK KGCWLDDERC YDRQECVATE
101 ENPQVYFCCC EGNFCNERFT HLPEAGGPEV TYEPPPTAPT GGGTHTCPPC
151 PAPELLGGPS VFLFPPKPKD TLMISRTPEV TCVVVDVSHE DPEVKFNWYV
201 DGVEVHNAKT KPREEQYNST YRVVSVLTVL HQDWLNGKEY KCKVSNKALP
251 APIEKTISKA KGQPREPQVY TLPPSREEMT KNQVSLTCLV KGFYPSDIAV
301 EWESNGQPEN NYKTTPPVLD SDGSFFLYSK LTVDKSRWQQ GNVFSCSVMH
351 EALHNHYTQK SLSLSPGK (SEQ ID NO: 456)

[0878] This ActRIIB(E52D, F82E, N83R)-G1Fc fusion polypeptide is encoded by the following nucleic acid sequence (SEQ ID NO: 457):

1 ATGGATGCAA TGAAGAGAGG GCTCTGCTGT GTGCTGCTGC TGTGTGGAGC
51 AGTCTTCGTT TCGCCCGGCG CCTCTGGGCG TGGGGAGGCT GAGACACGGG
101 AGTGCATCTA CTACAACGCC AACTGGGAGC TGGAGCGCAC CAACCAGAGC
151 GGCCTGGAGC GCTGCGAAGG CGACCAGGAC AAGCGGCTGC ACTGCTACGC
201 CTCCTGGCGC AACAGCTCTG GCACCATCGA GCTCGTGAAG AAGGGCTGCT
251 GGCTAGATGA CGAGCGGTGC TACGATAGGC AGGAGTGTGT GGCCACTGAG
301 GAGAACCCCC AGGTGTACTT CTGCTGCTGT GAAGGCAACT TCTGCAACGA
351 GCGCTTCACT CATTTGCCAG AGGCTGGGGG CCCGGAAGTC ACGTACGAGC
401 CACCCCCGAC AGCCCCCACC GGTGGTGGAA CTCACACATG CCCACCGTGC
451 CCAGCACCTG AACTCCTGGG GGGACCGTCA GTCTTCCTCT TCCCCCCAAA
501 ACCCAAGGAC ACCCTCATGA TCTCCCGGAC CCCTGAGGTC ACATGCGTGG
551 TGGTGGACGT GAGCCACGAA GACCCTGAGG TCAAGTTCAA CTGGTACGTG
601 GACGGCGTGG AGGTGCATAA TGCCAAGACA AAGCCGCGGG AGGAGCAGTA
651 CAACAGCACG TACCGTGTGG TCAGCGTCCT CACCGTCCTG CACCAGGACT
701 GGCTGAATGG CAAGGAGTAC AAGTGCAAGG TCTCCAACAA AGCCCTCCCA
751 GCCCCCATCG AGAAAACCAT CTCCAAAGCC AAAGGGCAGC CCCGAGAACC
801 ACAGGTGTAC ACCCTGCCCC CATCCCGGGA GGAGATGACC AAGAACCAGG
851 TCAGCCTGAC CTGCCTGGTC AAAGGCTTCT ATCCCAGCGA CATCGCCGTG
901 GAGTGGGAGA GCAATGGGCA GCCGGAGAAC AACTACAAGA CCACGCCTCC
951 CGTGCTGGAC TCCGACGGCT CCTTCTTCCT CTATAGCAAG CTCACCGTGG
1001 ACAAGAGCAG GTGGCAGCAG GGGAACGTCT TCTCATGCTC CGTGATGCAT
1051 GAGGCTCTGC ACAACCACTA CACGCAGAAG AGCCTCTCCC TGTCTCCGGG
1101 TAAA (SEQ ID NO: 457)

[0879] A mature ActRIIB(E52D, F82E, N83R)-G1Fc fusion polypeptide (SEQ ID NO: 458) is as follows and may optionally be provided with the lysine removed from the C-terminus. The G1Fc region may also comprise a mutation to an alanine at position 234 or a mutation to an alanine at position 235, or a combination thereof.

1 GRGEAETREC IYYNANWELE RTNQSGLERC EGDQDKRLHC YASWRNSSGT
51 IELVKKGCWL DDERCYDRQE CVATEENPQV YFCCCEGNFC NERFTHLPEA
101 GGPEVTYEPP PTAPTGGGTH TCPPCPAPEL LGGPSVFLFP PKPKDTLMIS
151 RTPEVTCVVV DVSHEDPEVK FNWYVDGVEV HNAKTKPREE QYNSTYRVVS
201 VLTVLHQDWL NGKEYKCKVS NKALPAPIEK TISKAKGQPR EPQVYTLPPS
251 REEMTKNQVS LTCLVKGFYP SDIAVEWESN GQPENNYKTT PPVLDSDGSF
301 FLYSKLTVDK SRWQQGNVFS CSVMHEALHN HYTQKSLSLS PGK
(SEQ ID NO: 458)

[0880] The amino acid sequence of unprocessed ActRIIB(E52D, F82T, N83R)-G1Fc is shown below (SEQ ID NO: 459). The signal sequence and linker sequences are indicated by solid underline, and the E52D, F82T, N83R substitutions are indicated by double underline. The amino acid sequence of SEQ ID NO: 459 may optionally be provided with the lysine removed from the C-terminus. The G1Fc region may also comprise a mutation to an alanine at position 234 or a mutation to an alanine at position 235, or a combination thereof.

1 MDAMKRGLCC VLLLCGAVFV SPGASGRGEA ETRECIYYNA NWELERTNQS
51 GLERCEGDQD KRLHCYASWR NSSGTIELVK KGCWLDDTRC YDRQECVATE
101 ENPQVYFCCC EGNFCNERFT HLPEAGGPEV TYEPPPTAPT GGGTHTCPPC
151 PAPELLGGPS VFLFPPKPKD TLMISRTPEV TCVVVDVSHE DPEVKFNWYV
201 DGVEVHNAKT KPREEQYNST YRVVSVLTVL HQDWLNGKEY KCKVSNKALP
251 APIEKTISKA KGQPREPQVY TLPPSREEMT KNQVSLTCLV KGFYPSDIAV
301 EWESNGQPEN NYKTTPPVLD SDGSFFLYSK LTVDKSRWQQ GNVFSCSVMH
351 EALHNHYTQK SLSLSPGK (SEQ ID NO: 459)

[0881] This ActRIIB(E52D, F82T, N83R)-G1Fc fusion polypeptide is encoded by the following nucleic acid sequence (SEQ ID NO: 460):

1 ATGGATGCAA TGAAGAGAGG GCTCTGCTGT GTGCTGCTGC TGTGTGGAGC
51 AGTCTTCGTT TCGCCCGGCG CCTCTGGGCG TGGGGAGGCT GAGACACGGG
101 AGTGCATCTA CTACAACGCC AACTGGGAGC TGGAGCGCAC CAACCAGAGC
151 GGCCTGGAGC GCTGCGAAGG CGACCAGGAC AAGCGGCTGC ACTGCTACGC
201 CTCCTGGCGC AACAGCTCTG GCACCATCGA GCTCGTGAAG AAGGGCTGCT
251 GGCTAGATGA CACCCGTTGC TACGATAGGC AGGAGTGTGT GGCCACTGAG
301 GAGAACCCCC AGGTGTACTT CTGCTGCTGT GAAGGCAACT TCTGCAACGA
351 GCGCTTCACT CATTTGCCAG AGGCTGGGGG CCCGGAAGTC ACGTACGAGC
401 CACCCCCGAC AGCCCCCACC GGTGGTGGAA CTCACACATG CCCACCGTGC
451 CCAGCACCTG AACTCCTGGG GGGACCGTCA GTCTTCCTCT TCCCCCCAAA
501 ACCCAAGGAC ACCCTCATGA TCTCCCGGAC CCCTGAGGTC ACATGCGTGG
551 TGGTGGACGT GAGCCACGAA GACCCTGAGG TCAAGTTCAA CTGGTACGTG
601 GACGGCGTGG AGGTGCATAA TGCCAAGACA AAGCCGCGGG AGGAGCAGTA
651 CAACAGCACG TACCGTGTGG TCAGCGTCCT CACCGTCCTG CACCAGGACT
701 GGCTGAATGG CAAGGAGTAC AAGTGCAAGG TCTCCAACAA AGCCCTCCCA
751 GCCCCCATCG AGAAAACCAT CTCCAAAGCC AAAGGGCAGC CCCGAGAACC
801 ACAGGTGTAC ACCCTGCCCC CATCCCGGGA GGAGATGACC AAGAACCAGG
851 TCAGCCTGAC CTGCCTGGTC AAAGGCTTCT ATCCCAGCGA CATCGCCGTG
901 GAGTGGGAGA GCAATGGGCA GCCGGAGAAC AACTACAAGA CCACGCCTCC
951 CGTGCTGGAC TCCGACGGCT CCTTCTTCCT CTATAGCAAG CTCACCGTGG
1001 ACAAGAGCAG GTGGCAGCAG GGGAACGTCT TCTCATGCTC CGTGATGCAT
1051 GAGGCTCTGC ACAACCACTA CACGCAGAAG AGCCTCTCCC TGTCTCCGGG
1101 TAAA (SEQ ID NO: 460)

[0882] A mature ActRIIB(E52D, F82T, N83R)-G1Fc fusion polypeptide (SEQ ID NO: 461) is as follows and may optionally be provided with the lysine removed from the C-terminus. The G1Fc region may also comprise a mutation to an alanine at position 234 or a mutation to an alanine at position 235, or a combination thereof.

1 GRGEAETREC IYYNANWELE RTNQSGLERC EGDQDKRLHC YASWRNSSGT
51 IELVKKGCWL DDTRCYDRQE CVATEENPQV YFCCCEGNFC NERFTHLPEA
101 GGPEVTYEPP PTAPTGGGTH TCPPCPAPEL LGGPSVFLFP PKPKDTLMIS
151 RTPEVTCVVV DVSHEDPEVK FNWYVDGVEV HNAKTKPREE QYNSTYRVVS
201 VLTVLHQDWL NGKEYKCKVS NKALPAPIEK TISKAKGQPR EPQVYTLPPS
251 REEMTKNQVS LTCLVKGFYP SDIAVEWESN GQPENNYKTT PPVLDSDGSF
301 FLYSKLTVDK SRWQQGNVFS CSVMHEALHN HYTQKSLSLS PGK
(SEQ ID NO: 461)

[0883] The amino acid sequence of unprocessed ActRIIB(E52N, F82I, N83R)-G1Fc is shown below (SEQ ID NO: 462). The signal sequence and linker sequences are indicated by solid underline, and the E52N, F82I, N83R substitutions are indicated by double underline. The amino acid sequence of SEQ ID NO: 462 may optionally be provided with the lysine removed from the C-terminus. The G1Fc region may also comprise a mutation to an alanine at position 234 or a mutation to an alanine at position 235, or a combination thereof.

1 MDAMKRGLCC VLLLCGAVFV SPGASGRGEA ETRECIYYNA NWELERTNQS
51 GLERCEGNQD KRLHCYASWR NSSGTIELVK KGCWLDDIRC YDRQECVATE
101 ENPQVYFCCC EGNFCNERFT HLPEAGGPEV TYEPPPTAPT GGGTHTCPPC
151 PAPELLGGPS VFLFPPKPKD TLMISRTPEV TCVVVDVSHE DPEVKFNWYV
201 DGVEVHNAKT KPREEQYNST YRVVSVLTVL HQDWLNGKEY KCKVSNKALP
251 APIEKTISKA KGQPREPQVY TLPPSREEMT KNQVSLTCLV KGFYPSDIAV
301 EWESNGQPEN NYKTTPPVLD SDGSFFLYSK LTVDKSRWQQ GNVFSCSVMH
351 EALHNHYTQK SLSLSPGK (SEQ ID NO: 462)

[0884] This ActRIIB(E52N, F82I, N83R)-G1Fc fusion polypeptide is encoded by the following nucleic acid sequence (SEQ ID NO: 463):

1 ATGGATGCAA TGAAGAGAGG GCTCTGCTGT GTGCTGCTGC TGTGTGGAGC
51 AGTCTTCGTT TCGCCCGGCG CCTCTGGGCG TGGGGAGGCT GAGACACGGG
101 AGTGCATCTA CTACAACGCC AACTGGGAGC TGGAGCGCAC CAACCAGAGC
151 GGCCTGGAGC GCTGCGAAGG CAACCAGGAC AAGCGGCTGC ACTGCTACGC
201 CTCCTGGCGC AACAGCTCTG GCACCATCGA GCTCGTGAAG AAGGGCTGCT
251 GGCTAGATGA CATCCGTTGC TACGATAGGC AGGAGTGTGT GGCCACTGAG
301 GAGAACCCCC AGGTGTACTT CTGCTGCTGT GAAGGCAACT TCTGCAACGA
351 GCGCTTCACT CATTTGCCAG AGGCTGGGGG CCCGGAAGTC ACGTACGAGC
401 CACCCCCGAC AGCCCCCACC GGTGGTGGAA CTCACACATG CCCACCGTGC
451 CCAGCACCTG AACTCCTGGG GGGACCGTCA GTCTTCCTCT TCCCCCCAAA
501 ACCCAAGGAC ACCCTCATGA TCTCCCGGAC CCCTGAGGTC ACATGCGTGG
551 TGGTGGACGT GAGCCACGAA GACCCTGAGG TCAAGTTCAA CTGGTACGTG
601 GACGGCGTGG AGGTGCATAA TGCCAAGACA AAGCCGCGGG AGGAGCAGTA
651 CAACAGCACG TACCGTGTGG TCAGCGTCCT CACCGTCCTG CACCAGGACT
701 GGCTGAATGG CAAGGAGTAC AAGTGCAAGG TCTCCAACAA AGCCCTCCCA
751 GCCCCCATCG AGAAAACCAT CTCCAAAGCC AAAGGGCAGC CCCGAGAACC
801 ACAGGTGTAC ACCCTGCCCC CATCCCGGGA GGAGATGACC AAGAACCAGG
851 TCAGCCTGAC CTGCCTGGTC AAAGGCTTCT ATCCCAGCGA CATCGCCGTG
901 GAGTGGGAGA GCAATGGGCA GCCGGAGAAC AACTACAAGA CCACGCCTCC
951 CGTGCTGGAC TCCGACGGCT CCTTCTTCCT CTATAGCAAG CTCACCGTGG
1001 ACAAGAGCAG GTGGCAGCAG GGGAACGTCT TCTCATGCTC CGTGATGCAT
1051 GAGGCTCTGC ACAACCACTA CACGCAGAAG AGCCTCTCCC TGTCTCCGGG
1101 TAAA (SEQ ID NO: 463)

[0885] A mature ActRIIB(E52N, F82I, N83R)-G1Fc fusion polypeptide (SEQ ID NO: 464) is as follows and may optionally be provided with the lysine removed from the C-terminus. The G1Fc region may also comprise a mutation to an alanine at position 234 or a mutation to an alanine at position 235, or a combination thereof.

1 GRGEAETREC IYYNANWELE RTNQSGLERC EGNQDKRLHC YASWRNSSGT
51 IELVKKGCWL DDIRCYDRQE CVATEENPQV YFCCCEGNFC NERFTHLPEA
101 GGPEVTYEPP PTAPTGGGTH TCPPCPAPEL LGGPSVFLFP PKPKDTLMIS
151 RTPEVTCVVV DVSHEDPEVK FNWYVDGVEV HNAKTKPREE QYNSTYRVVS
201 VLTVLHQDWL NGKEYKCKVS NKALPAPIEK TISKAKGQPR EPQVYTLPPS
251 REEMTKNQVS LTCLVKGFYP SDIAVEWESN GQPENNYKTT PPVLDSDGSF
301 FLYSKLTVDK SRWQQGNVFS CSVMHEALHN HYTQKSLSLS PGK
(SEQ ID NO: 464)

[0886] The amino acid sequence of unprocessed ActRIIB(E52N, F82Y, N83R)-G1Fc is shown below (SEQ ID NO: 465). The signal sequence and linker sequences are indicated by solid underline, and the E52N, F82Y, N83R substitutions are indicated by double underline. The amino acid sequence of SEQ ID NO: 465 may optionally be provided with the lysine removed from the C-terminus. The G1Fc region may also comprise a mutation to an alanine at position 234 or a mutation to an alanine at position 235, or a combination thereof.

1 MDAMKRGLCC VLLLCGAVFV SPGASGRGEA ETRECIYYNA NWELERTNQS
51 GLERCEGNQD KRLHCYASWR NSSGTIELVK KGCWLDDYRC YDRQECVATE
101 ENPQVYFCCC EGNFCNERFT HLPEAGGPEV TYEPPPTAPT GGGTHTCPPC
151 PAPELLGGPS VFLFPPKPKD TLMISRTPEV TCVVVDVSHE DPEVKFNWYV
201 DGVEVHNAKT KPREEQYNST YRVVSVLTVL HQDWLNGKEY KCKVSNKALP
251 APIEKTISKA KGQPREPQVY TLPPSREEMT KNQVSLTCLV KGFYPSDIAV
301 EWESNGQPEN NYKTTPPVLD SDGSFFLYSK LTVDKSRWQQ GNVFSCSVMH
351 EALHNHYTQK SLSLSPGK (SEQ ID NO: 465)

[0887] This ActRIIB(E52N, F82Y, N83R)-G1Fc fusion polypeptide is encoded by the following nucleic acid sequence (SEQ ID NO: 466):

1 ATGGATGCAA TGAAGAGAGG GCTCTGCTGT GTGCTGCTGC TGTGTGGAGC
51 AGTCTTCGTT TCGCCCGGCG CCTCTGGGCG TGGGGAGGCT GAGACACGGG
101 AGTGCATCTA CTACAACGCC AACTGGGAGC TGGAGCGCAC CAACCAGAGC
151 GGCCTGGAGC GCTGCGAAGG CAACCAGGAC AAGCGGCTGC ACTGCTACGC
201 CTCCTGGCGC AACAGCTCTG GCACCATCGA GCTCGTGAAG AAGGGCTGCT
251 GGCTAGATGA CTACCGGTGC TACGATAGGC AGGAGTGTGT GGCCACTGAG
301 GAGAACCCCC AGGTGTACTT CTGCTGCTGT GAAGGCAACT TCTGCAACGA
351 GCGCTTCACT CATTTGCCAG AGGCTGGGGG CCCGGAAGTC ACGTACGAGC
401 CACCCCCGAC AGCCCCCACC GGTGGTGGAA CTCACACATG CCCACCGTGC
451 CCAGCACCTG AACTCCTGGG GGGACCGTCA GTCTTCCTCT TCCCCCCAAA
501 ACCCAAGGAC ACCCTCATGA TCTCCCGGAC CCCTGAGGTC ACATGCGTGG
551 TGGTGGACGT GAGCCACGAA GACCCTGAGG TCAAGTTCAA CTGGTACGTG
601 GACGGCGTGG AGGTGCATAA TGCCAAGACA AAGCCGCGGG AGGAGCAGTA
651 CAACAGCACG TACCGTGTGG TCAGCGTCCT CACCGTCCTG CACCAGGACT
701 GGCTGAATGG CAAGGAGTAC AAGTGCAAGG TCTCCAACAA AGCCCTCCCA
751 GCCCCCATCG AGAAAACCAT CTCCAAAGCC AAAGGGCAGC CCCGAGAACC
801 ACAGGTGTAC ACCCTGCCCC CATCCCGGGA GGAGATGACC AAGAACCAGG
851 TCAGCCTGAC CTGCCTGGTC AAAGGCTTCT ATCCCAGCGA CATCGCCGTG
901 GAGTGGGAGA GCAATGGGCA GCCGGAGAAC AACTACAAGA CCACGCCTCC
951 CGTGCTGGAC TCCGACGGCT CCTTCTTCCT CTATAGCAAG CTCACCGTGG
1001 ACAAGAGCAG GTGGCAGCAG GGGAACGTCT TCTCATGCTC CGTGATGCAT
1051 GAGGCTCTGC ACAACCACTA CACGCAGAAG AGCCTCTCCC TGTCTCCGGG
1101 TAAA (SEQ ID NO: 466)

[0888] A mature ActRIIB(E52N, F82Y, N83R)-G1Fc fusion polypeptide (SEQ ID NO: 467) is as follows and may optionally be provided with the lysine removed from the C-terminus. The G1Fc region may also comprise a mutation to an alanine at position 234 or a mutation to an alanine at position 235, or a combination thereof.

1 GRGEAETREC IYYNANWELE RTNQSGLERC EGNQDKRLHC YASWRNSSGT
51 IELVKKGCWL DDYRCYDRQE CVATEENPQV YFCCCEGNFC NERFTHLPEA
101 GGPEVTYEPP PTAPTGGGTH TCPPCPAPEL LGGPSVFLFP PKPKDTLMIS
151 RTPEVTCVVV DVSHEDPEVK FNWYVDGVEV HNAKTKPREE QYNSTYRVVS
201 VLTVLHQDWL NGKEYKCKVS NKALPAPIEK TISKAKGQPR EPQVYTLPPS
251 REEMTKNQVS LTCLVKGFYP SDIAVEWESN GQPENNYKTT PPVLDSDGSF
301 FLYSKLTVDK SRWQQGNVFS CSVMHEALHN HYTQKSLSLS PGK
(SEQ ID NO: 467)

[0889] The amino acid sequence of unprocessed ActRIIB(E52Y, F82D,N83R)-G1Fc is shown below (SEQ ID NO: 468). The signal sequence and linker sequences are indicated by solid underline, and the E52Y, F82D, N83R substitutions are indicated by double underline. The amino acid sequence of SEQ ID NO: 468 may optionally be provided with the lysine removed from the C-terminus. The G1Fc region may also comprise a mutation to an alanine at position 234 or a mutation to an alanine at position 235, or a combination thereof.

1 MDAMKRGLCC VLLLCGAVFV SPGASGRGEA ETRECIYYNA NWELERTNQS
51 GLERCEGYQD KRLHCYASWR NSSGTIELVK KGCWLDDDRC YDRQECVATE
101 ENPQVYFCCC EGNFCNERFT HLPEAGGPEV TYEPPPTAPT GGGTHTCPPC
151 PAPELLGGPS VFLFPPKPKD TLMISRTPEV TCVVVDVSHE DPEVKFNWYV
201 DGVEVHNAKT KPREEQYNST YRVVSVLTVL HQDWLNGKEY KCKVSNKALP
251 APIEKTISKA KGQPREPQVY TLPPSREEMT KNQVSLTCLV KGFYPSDIAV
301 EWESNGQPEN NYKTTPPVLD SDGSFFLYSK LTVDKSRWQQ GNVFSCSVMH
351 EALHNHYTQK SLSLSPGK (SEQ ID NO: 468)

[0890] This ActRIIB(E52Y, F82D,N83R)-G1Fc fusion polypeptide is encoded by the following nucleic acid sequence (SEQ ID NO: 469):

1 ATGGATGCAA TGAAGAGAGG GCTCTGCTGT GTGCTGCTGC TGTGTGGAGC
51 AGTCTTCGTT TCGCCCGGCG CCTCTGGGCG TGGGGAGGCT GAGACACGGG
101 AGTGCATCTA CTACAACGCC AACTGGGAGC TGGAGCGCAC CAACCAGAGC
151 GGCCTGGAGC GCTGCGAAGG CTACCAGGAC AAGCGGCTGC ACTGCTACGC
201 CTCCTGGCGC AACAGCTCTG GCACCATCGA GCTCGTGAAG AAGGGCTGCT
251 GGCTAGATGA CGACCGTTGC TACGATAGGC AGGAGTGTGT GGCCACTGAG
301 GAGAACCCCC AGGTGTACTT CTGCTGCTGT GAAGGCAACT TCTGCAACGA
351 GCGCTTCACT CATTTGCCAG AGGCTGGGGG CCCGGAAGTC ACGTACGAGC
401 CACCCCCGAC AGCCCCCACC GGTGGTGGAA CTCACACATG CCCACCGTGC
451 CCAGCACCTG AACTCCTGGG GGGACCGTCA GTCTTCCTCT TCCCCCCAAA
501 ACCCAAGGAC ACCCTCATGA TCTCCCGGAC CCCTGAGGTC ACATGCGTGG
551 TGGTGGACGT GAGCCACGAA GACCCTGAGG TCAAGTTCAA CTGGTACGTG
601 GACGGCGTGG AGGTGCATAA TGCCAAGACA AAGCCGCGGG AGGAGCAGTA
651 CAACAGCACG TACCGTGTGG TCAGCGTCCT CACCGTCCTG CACCAGGACT
701 GGCTGAATGG CAAGGAGTAC AAGTGCAAGG TCTCCAACAA AGCCCTCCCA
751 GCCCCCATCG AGAAAACCAT CTCCAAAGCC AAAGGGCAGC CCCGAGAACC
801 ACAGGTGTAC ACCCTGCCCC CATCCCGGGA GGAGATGACC AAGAACCAGG
851 TCAGCCTGAC CTGCCTGGTC AAAGGCTTCT ATCCCAGCGA CATCGCCGTG
901 GAGTGGGAGA GCAATGGGCA GCCGGAGAAC AACTACAAGA CCACGCCTCC
951 CGTGCTGGAC TCCGACGGCT CCTTCTTCCT CTATAGCAAG CTCACCGTGG
1001 ACAAGAGCAG GTGGCAGCAG GGGAACGTCT TCTCATGCTC CGTGATGCAT
1051 GAGGCTCTGC ACAACCACTA CACGCAGAAG AGCCTCTCCC TGTCTCCGGG
1101 TAAA (SEQ ID NO: 469)

[0891] A mature ActRIIB(E52Y, F82D,N83R)-G1Fc fusion polypeptide (SEQ ID NO: 470) is as follows and may optionally be provided with the lysine removed from the C-terminus. The G1Fc region may also comprise a mutation to an alanine at position 234 or a mutation to an alanine at position 235, or a combination thereof.

1 GRGEAETREC IYYNANWELE RTNQSGLERC EGYQDKRLHC YASWRNSSGT
51 IELVKKGCWL DDDRCYDRQE CVATEENPQV YFCCCEGNFC NERFTHLPEA
101 GGPEVTYEPP PTAPTGGGTH TCPPCPAPEL LGGPSVFLFP PKPKDTLMIS
151 RTPEVTCVVV DVSHEDPEVK FNWYVDGVEV HNAKTKPREE QYNSTYRVVS
201 VLTVLHQDWL NGKEYKCKVS NKALPAPIEK TISKAKGQPR EPQVYTLPPS
251 REEMTKNQVS LTCLVKGFYP SDIAVEWESN GQPENNYKTT PPVLDSDGSF
301 FLYSKLTVDK SRWQQGNVFS CSVMHEALHN HYTQKSLSLS PGK
(SEQ ID NO: 470)

[0892] The amino acid sequence of unprocessed ActRIIB(L57E, F82E, N83R)-G1Fc is shown below (SEQ ID NO: 471). The signal sequence and linker sequences are indicated by solid underline, and the L57E, F82E, N83R substitutions are indicated by double underline. The amino acid sequence of SEQ ID NO: 471 may optionally be provided with the lysine removed from the C-terminus. The G1Fc region may also comprise a mutation to an alanine at position 234 or a mutation to an alanine at position 235, or a combination thereof.

1 MDAMKRGLCC VLLLCGAVFV SPGASGRGEA ETRECIYYNA NWELERTNQS
51 GLERCEGEQD KREHCYASWR NSSGTIELVK KGCWLDDERC YDRQECVATE
101 ENPQVYFCCC EGNFCNERFT HLPEAGGPEV TYEPPPTAPT GGGTHTCPPC
151 PAPELLGGPS VFLFPPKPKD TLMISRTPEV TCVVVDVSHE DPEVKFNWYV
201 DGVEVHNAKT KPREEQYNST YRVVSVLTVL HQDWLNGKEY KCKVSNKALP
251 APIEKTISKA KGQPREPQVY TLPPSREEMT KNQVSLTCLV KGFYPSDIAV
301 EWESNGQPEN NYKTTPPVLD SDGSFFLYSK LTVDKSRWQQ GNVFSCSVMH
351 EALHNHYTQK SLSLSPGK (SEQ ID NO: 471)

[0893] This ActRIIB(L57E, F82E, N83R)-G1Fc fusion polypeptide is encoded by the following nucleic acid sequence (SEQ ID NO: 472):

1 ATGGATGCAA TGAAGAGAGG GCTCTGCTGT GTGCTGCTGC TGTGTGGAGC
51 AGTCTTCGTT TCGCCCGGCG CCTCTGGGCG TGGGGAGGCT GAGACACGGG
101 AGTGCATCTA CTACAACGCC AACTGGGAGC TGGAGCGCAC CAACCAGAGC
151 GGCCTGGAGC GCTGCGAAGG CGAGCAGGAC AAGCGGGAGC ACTGCTACGC
201 CTCCTGGCGC AACAGCTCTG GCACCATCGA GCTCGTGAAG AAGGGCTGCT
251 GGCTAGATGA CGAGCGGTGC TACGATAGGC AGGAGTGTGT GGCCACTGAG
301 GAGAACCCCC AGGTGTACTT CTGCTGCTGT GAAGGCAACT TCTGCAACGA
351 GCGCTTCACT CATTTGCCAG AGGCTGGGGG CCCGGAAGTC ACGTACGAGC
401 CACCCCCGAC AGCCCCCACC GGTGGTGGAA CTCACACATG CCCACCGTGC
451 CCAGCACCTG AACTCCTGGG GGGACCGTCA GTCTTCCTCT TCCCCCCAAA
501 ACCCAAGGAC ACCCTCATGA TCTCCCGGAC CCCTGAGGTC ACATGCGTGG
551 TGGTGGACGT GAGCCACGAA GACCCTGAGG TCAAGTTCAA CTGGTACGTG
601 GACGGCGTGG AGGTGCATAA TGCCAAGACA AAGCCGCGGG AGGAGCAGTA
651 CAACAGCACG TACCGTGTGG TCAGCGTCCT CACCGTCCTG CACCAGGACT
701 GGCTGAATGG CAAGGAGTAC AAGTGCAAGG TCTCCAACAA AGCCCTCCCA
751 GCCCCCATCG AGAAAACCAT CTCCAAAGCC AAAGGGCAGC CCCGAGAACC
801 ACAGGTGTAC ACCCTGCCCC CATCCCGGGA GGAGATGACC AAGAACCAGG
851 TCAGCCTGAC CTGCCTGGTC AAAGGCTTCT ATCCCAGCGA CATCGCCGTG
901 GAGTGGGAGA GCAATGGGCA GCCGGAGAAC AACTACAAGA CCACGCCTCC
951 CGTGCTGGAC TCCGACGGCT CCTTCTTCCT CTATAGCAAG CTCACCGTGG
1001 ACAAGAGCAG GTGGCAGCAG GGGAACGTCT TCTCATGCTC CGTGATGCAT
1051 GAGGCTCTGC ACAACCACTA CACGCAGAAG AGCCTCTCCC TGTCTCCGGG
1101 TAAA (SEQ ID NO: 472)

[0894] A mature ActRIIB(L57E, F82E, N83R)-G1Fc fusion polypeptide (SEQ ID NO: 473) is as follows and may optionally be provided with the lysine removed from the C-terminus. The G1Fc region may also comprise a mutation to an alanine at position 234 or a mutation to an alanine at position 235, or a combination thereof.

1 GRGEAETREC IYYNANWELE RTNQSGLERC EGEQDKREHC YASWRNSSGT
51 IELVKKGCWL DDERCYDRQE CVATEENPQV YFCCCEGNFC NERFTHLPEA
101 GGPEVTYEPP PTAPTGGGTH TCPPCPAPEL LGGPSVFLFP PKPKDTLMIS
151 RTPEVTCVVV DVSHEDPEVK FNWYVDGVEV HNAKTKPREE QYNSTYRVVS
201 VLTVLHQDWL NGKEYKCKVS NKALPAPIEK TISKAKGQPR EPQVYTLPPS
251 REEMTKNQVS LTCLVKGFYP SDIAVEWESN GQPENNYKTT PPVLDSDGSF
301 FLYSKLTVDK SRWQQGNVFS CSVMHEALHN HYTQKSLSLS PGK
(SEQ ID NO: 473)

[0895] The amino acid sequence of unprocessed ActRIIB(L57I, F82D, N83R)-G1Fc is shown below (SEQ ID NO: 474). The signal sequence and linker sequences are indicated by solid underline, and the L57I, F82D, N83R substitutions are indicated by double underline. The amino acid sequence of SEQ ID NO: 474 may optionally be provided with the lysine removed from the C-terminus. The G1Fc region may also comprise a mutation to an alanine at position 234 or a mutation to an alanine at position 235, or a combination thereof.

1 MDAMKRGLCC VLLLCGAVFV SPGASGRGEA ETRECIYYNA NWELERTNQS
51 GLERCEGEQD KRIHCYASWR NSSGTIELVK KGCWLDDDRC YDRQECVATE
101 ENPQVYFCCC EGNFCNERFT HLPEAGGPEV TYEPPPTAPT GGGTHTCPPC
151 PAPELLGGPS VFLFPPKPKD TLMISRTPEV TCVVVDVSHE DPEVKFNWYV
201 DGVEVHNAKT KPREEQYNST YRVVSVLTVL HQDWLNGKEY KCKVSNKALP
251 APIEKTISKA KGQPREPQVY TLPPSREEMT KNQVSLTCLV KGFYPSDIAV
301 EWESNGQPEN NYKTTPPVLD SDGSFFLYSK LTVDKSRWQQ GNVFSCSVMH
351 EALHNHYTQK SLSLSPGK (SEQ ID NO: 474)

[0896] This ActRIIB(L57I, F82D, N83R)-G1Fc fusion polypeptide is encoded by the following nucleic acid sequence (SEQ ID NO: 475):

1 ATGGATGCAA TGAAGAGAGG GCTCTGCTGT GTGCTGCTGC TGTGTGGAGC
51 AGTCTTCGTT TCGCCCGGCG CCTCTGGGCG TGGGGAGGCT GAGACACGGG
101 AGTGCATCTA CTACAACGCC AACTGGGAGC TGGAGCGCAC CAACCAGAGC
151 GGCCTGGAGC GCTGCGAAGG CGAGCAGGAC AAGCGGATCC ACTGCTACGC
201 CTCCTGGCGC AACAGCTCTG GCACCATCGA GCTCGTGAAG AAGGGCTGCT
251 GGCTAGATGA CGACCGTTGC TACGATAGGC AGGAGTGTGT GGCCACTGAG
301 GAGAACCCCC AGGTGTACTT CTGCTGCTGT GAAGGCAACT TCTGCAACGA
351 GCGCTTCACT CATTTGCCAG AGGCTGGGGG CCCGGAAGTC ACGTACGAGC
401 CACCCCCGAC AGCCCCCACC GGTGGTGGAA CTCACACATG CCCACCGTGC
451 CCAGCACCTG AACTCCTGGG GGGACCGTCA GTCTTCCTCT TCCCCCCAAA
501 ACCCAAGGAC ACCCTCATGA TCTCCCGGAC CCCTGAGGTC ACATGCGTGG
551 TGGTGGACGT GAGCCACGAA GACCCTGAGG TCAAGTTCAA CTGGTACGTG
601 GACGGCGTGG AGGTGCATAA TGCCAAGACA AAGCCGCGGG AGGAGCAGTA
651 CAACAGCACG TACCGTGTGG TCAGCGTCCT CACCGTCCTG CACCAGGACT
701 GGCTGAATGG CAAGGAGTAC AAGTGCAAGG TCTCCAACAA AGCCCTCCCA
751 GCCCCCATCG AGAAAACCAT CTCCAAAGCC AAAGGGCAGC CCCGAGAACC
801 ACAGGTGTAC ACCCTGCCCC CATCCCGGGA GGAGATGACC AAGAACCAGG
851 TCAGCCTGAC CTGCCTGGTC AAAGGCTTCT ATCCCAGCGA CATCGCCGTG
901 GAGTGGGAGA GCAATGGGCA GCCGGAGAAC AACTACAAGA CCACGCCTCC
951 CGTGCTGGAC TCCGACGGCT CCTTCTTCCT CTATAGCAAG CTCACCGTGG
1001 ACAAGAGCAG GTGGCAGCAG GGGAACGTCT TCTCATGCTC CGTGATGCAT
1051 GAGGCTCTGC ACAACCACTA CACGCAGAAG AGCCTCTCCC TGTCTCCGGG
1101 TAAA (SEQ ID NO: 475)

[0897] A mature ActRIIB(L57I, F82D, N83R)-G1Fc fusion polypeptide (SEQ ID NO: 476) is as follows and may optionally be provided with the lysine removed from the C-terminus. The G1Fc region may also comprise a mutation to an alanine at position 234 or a mutation to an alanine at position 235, or a combination thereof.

1 GRGEAETREC IYYNANWELE RTNQSGLERC EGEQDKRIHC YASWRNSSGT
51 IELVKKGCWL DDDRCYDRQE CVATEENPQV YFCCCEGNFC NERFTHLPEA
101 GGPEVTYEPP PTAPTGGGTH TCPPCPAPEL LGGPSVFLFP PKPKDTLMIS
151 RTPEVTCVVV DVSHEDPEVK FNWYVDGVEV HNAKTKPREE QYNSTYRVVS
201 VLTVLHQDWL NGKEYKCKVS NKALPAPIEK TISKAKGQPR EPQVYTLPPS
251 REEMTKNQVS LTCLVKGFYP SDIAVEWESN GQPENNYKTT PPVLDSDGSF
301 FLYSKLTVDK SRWQQGNVFS CSVMHEALHN HYTQKSLSLS PGK
(SEQ ID NO: 476)

[0898] The amino acid sequence of unprocessed ActRIIB(L57I, F82E, N83R)-G1Fc is shown below (SEQ ID NO: 477). The signal sequence and linker sequences are indicated by solid underline, and the L57I, F82E, N83R substitutions are indicated by double underline. The amino acid sequence of SEQ ID NO: 477 may optionally be provided with the lysine removed from the C-terminus. The G1Fc region may also comprise a mutation to an alanine at position 234 or a mutation to an alanine at position 235, or a combination thereof.

1 MDAMKRGLCC VLLLCGAVFV SPGASGRGEA ETRECIYYNA NWELERTNQS
51 GLERCEGEQD KRIHCYASWR NSSGTIELVK KGCWLDDERC YDRQECVATE
101 ENPQVYFCCC EGNFCNERFT HLPEAGGPEV TYEPPPTAPT GGGTHTCPPC
151 PAPELLGGPS VFLFPPKPKD TLMISRTPEV TCVVVDVSHE DPEVKFNWYV
201 DGVEVHNAKT KPREEQYNST YRVVSVLTVL HQDWLNGKEY KCKVSNKALP
251 APIEKTISKA KGQPREPQVY TLPPSREEMT KNQVSLTCLV KGFYPSDIAV
301 EWESNGQPEN NYKTTPPVLD SDGSFFLYSK LTVDKSRWQQ GNVFSCSVMH
351 EALHNHYTQK SLSLSPGK (SEQ ID NO: 477)

[0899] This ActRIIB(L57I, F82E, N83R)-G1Fc fusion polypeptide is encoded by the following nucleic acid sequence (SEQ ID NO: 478):

1 ATGGATGCAA TGAAGAGAGG GCTCTGCTGT GTGCTGCTGC TGTGTGGAGC
51 AGTCTTCGTT TCGCCCGGCG CCTCTGGGCG TGGGGAGGCT GAGACACGGG
101 AGTGCATCTA CTACAACGCC AACTGGGAGC TGGAGCGCAC CAACCAGAGC
151 GGCCTGGAGC GCTGCGAAGG CGAGCAGGAC AAGCGGATCC ACTGCTACGC
201 CTCCTGGCGC AACAGCTCTG GCACCATCGA GCTCGTGAAG AAGGGCTGCT
251 GGCTAGATGA CGAGCGTTGC TACGATAGGC AGGAGTGTGT GGCCACTGAG
301 GAGAACCCCC AGGTGTACTT CTGCTGCTGT GAAGGCAACT TCTGCAACGA
351 GCGCTTCACT CATTTGCCAG AGGCTGGGGG CCCGGAAGTC ACGTACGAGC
401 CACCCCCGAC AGCCCCCACC GGTGGTGGAA CTCACACATG CCCACCGTGC
451 CCAGCACCTG AACTCCTGGG GGGACCGTCA GTCTTCCTCT TCCCCCCAAA
501 ACCCAAGGAC ACCCTCATGA TCTCCCGGAC CCCTGAGGTC ACATGCGTGG
551 TGGTGGACGT GAGCCACGAA GACCCTGAGG TCAAGTTCAA CTGGTACGTG
601 GACGGCGTGG AGGTGCATAA TGCCAAGACA AAGCCGCGGG AGGAGCAGTA
651 CAACAGCACG TACCGTGTGG TCAGCGTCCT CACCGTCCTG CACCAGGACT
701 GGCTGAATGG CAAGGAGTAC AAGTGCAAGG TCTCCAACAA AGCCCTCCCA
751 GCCCCCATCG AGAAAACCAT CTCCAAAGCC AAAGGGCAGC CCCGAGAACC
801 ACAGGTGTAC ACCCTGCCCC CATCCCGGGA GGAGATGACC AAGAACCAGG
851 TCAGCCTGAC CTGCCTGGTC AAAGGCTTCT ATCCCAGCGA CATCGCCGTG
901 GAGTGGGAGA GCAATGGGCA GCCGGAGAAC AACTACAAGA CCACGCCTCC
951 CGTGCTGGAC TCCGACGGCT CCTTCTTCCT CTATAGCAAG CTCACCGTGG
1001 ACAAGAGCAG GTGGCAGCAG GGGAACGTCT TCTCATGCTC CGTGATGCAT
1051 GAGGCTCTGC ACAACCACTA CACGCAGAAG AGCCTCTCCC TGTCTCCGGG
1101 TAAA (SEQ ID NO: 478)

[0900] A mature ActRIIB(L57I, F82E, N83R)-G1Fc fusion polypeptide (SEQ ID NO: 479) is as follows and may optionally be provided with the lysine removed from the C-terminus. The G1Fc region may also comprise a mutation to an alanine at position 234 or a mutation to an alanine at position 235, or a combination thereof.

1 GRGEAETREC IYYNANWELE RTNQSGLERC EGEQDKRIHC YASWRNSSGT
51 IELVKKGCWL DDERCYDRQE CVATEENPQV YFCCCEGNFC NERFTHLPEA
101 GGPEVTYEPP PTAPTGGGTH TCPPCPAPEL LGGPSVFLFP PKPKDTLMIS
151 RTPEVTCVVV DVSHEDPEVK FNWYVDGVEV HNAKTKPREE QYNSTYRVVS
201 VLTVLHQDWL NGKEYKCKVS NKALPAPIEK TISKAKGQPR EPQVYTLPPS
251 REEMTKNQVS LTCLVKGFYP SDIAVEWESN GQPENNYKTT PPVLDSDGSF
301 FLYSKLTVDK SRWQQGNVFS CSVMHEALHN HYTQKSLSLS PGK
(SEQ ID NO: 479)

[0901] The amino acid sequence of unprocessed ActRIIB(L57R, F82D, N83R)-G1Fc is shown below (SEQ ID NO: 480). The signal sequence and linker sequences are indicated by solid underline, and the L57R, F82D, N83R substitutions are indicated by double underline. The amino acid sequence of SEQ ID NO: 480 may optionally be provided with the lysine removed from the C-terminus. The G1Fc region may also comprise a mutation to an alanine at position 234 or a mutation to an alanine at position 235, or a combination thereof.

1 MDAMKRGLCC VLLLCGAVFV SPGASGRGEA ETRECIYYNA NWELERTNQS
51 GLERCEGEQD KRRHCYASWR NSSGTIELVK KGCWLDDDRC YDRQECVATE
101 ENPQVYFCCC EGNFCNERFT HLPEAGGPEV TYEPPPTAPT GGGTHTCPPC
151 PAPELLGGPS VFLFPPKPKD TLMISRTPEV TCVVVDVSHE DPEVKFNWYV
201 DGVEVHNAKT KPREEQYNST YRVVSVLTVL HQDWLNGKEY KCKVSNKALP
251 APIEKTISKA KGQPREPQVY TLPPSREEMT KNQVSLTCLV KGFYPSDIAV
301 EWESNGQPEN NYKTTPPVLD SDGSFFLYSK LTVDKSRWQQ GNVFSCSVMH
351 EALHNHYTQK SLSLSPGK (SEQ ID NO: 480)

[0902] This ActRIIB(L57R, F82D, N83R)-G1Fc fusion polypeptide is encoded by the following nucleic acid sequence (SEQ ID NO: 481):

1 ATGGATGCAA TGAAGAGAGG GCTCTGCTGT GTGCTGCTGC TGTGTGGAGC
51 AGTCTTCGTT TCGCCCGGCG CCTCTGGGCG TGGGGAGGCT GAGACACGGG
101 AGTGCATCTA CTACAACGCC AACTGGGAGC TGGAGCGCAC CAACCAGAGC
151 GGCCTGGAGC GCTGCGAAGG CGAGCAGGAC AAGCGGAGGC ACTGCTACGC
201 CTCCTGGCGC AACAGCTCTG GCACCATCGA GCTCGTGAAG AAGGGCTGCT
251 GGCTAGATGA CGACCGTTGC TACGATAGGC AGGAGTGTGT GGCCACTGAG
301 GAGAACCCCC AGGTGTACTT CTGCTGCTGT GAAGGCAACT TCTGCAACGA
351 GCGCTTCACT CATTTGCCAG AGGCTGGGGG CCCGGAAGTC ACGTACGAGC
401 CACCCCCGAC AGCCCCCACC GGTGGTGGAA CTCACACATG CCCACCGTGC
451 CCAGCACCTG AACTCCTGGG GGGACCGTCA GTCTTCCTCT TCCCCCCAAA
501 ACCCAAGGAC ACCCTCATGA TCTCCCGGAC CCCTGAGGTC ACATGCGTGG
551 TGGTGGACGT GAGCCACGAA GACCCTGAGG TCAAGTTCAA CTGGTACGTG
601 GACGGCGTGG AGGTGCATAA TGCCAAGACA AAGCCGCGGG AGGAGCAGTA
651 CAACAGCACG TACCGTGTGG TCAGCGTCCT CACCGTCCTG CACCAGGACT
701 GGCTGAATGG CAAGGAGTAC AAGTGCAAGG TCTCCAACAA AGCCCTCCCA
751 GCCCCCATCG AGAAAACCAT CTCCAAAGCC AAAGGGCAGC CCCGAGAACC
801 ACAGGTGTAC ACCCTGCCCC CATCCCGGGA GGAGATGACC AAGAACCAGG
851 TCAGCCTGAC CTGCCTGGTC AAAGGCTTCT ATCCCAGCGA CATCGCCGTG
901 GAGTGGGAGA GCAATGGGCA GCCGGAGAAC AACTACAAGA CCACGCCTCC
951 CGTGCTGGAC TCCGACGGCT CCTTCTTCCT CTATAGCAAG CTCACCGTGG
1001 ACAAGAGCAG GTGGCAGCAG GGGAACGTCT TCTCATGCTC CGTGATGCAT
1051 GAGGCTCTGC ACAACCACTA CACGCAGAAG AGCCTCTCCC TGTCTCCGGG
1101 TAAA (SEQ ID NO: 481)

[0903] A mature ActRIIB(L57R, F82D, N83R)-G1Fc fusion polypeptide (SEQ ID NO: 482) is as follows and may optionally be provided with the lysine removed from the C-terminus. The G1Fc region may also comprise a mutation to an alanine at position 234 or a mutation to an alanine at position 235, or a combination thereof.

1 GRGEAETREC IYYNANWELE RTNQSGLERC EGEQDKRRHC YASWRNSSGT
51 IELVKKGCWL DDDRCYDRQE CVATEENPQV YFCCCEGNFC NERFTHLPEA
101 GGPEVTYEPP PTAPTGGGTH TCPPCPAPEL LGGPSVFLFP PKPKDTLMIS
151 RTPEVTCVVV DVSHEDPEVK FNWYVDGVEV HNAKTKPREE QYNSTYRVVS
201 VLTVLHQDWL NGKEYKCKVS NKALPAPIEK TISKAKGQPR EPQVYTLPPS
251 REEMTKNQVS LTCLVKGFYP SDIAVEWESN GQPENNYKTT PPVLDSDGSF
301 FLYSKLTVDK SRWQQGNVFS CSVMHEALHN HYTQKSLSLS PGK
(SEQ ID NO: 482)

[0904] The amino acid sequence of unprocessed ActRIIB(L57R, F82E, N83R)-G1Fc is shown below (SEQ ID NO: 483). The signal sequence and linker sequences are indicated by solid underline, and the L57R, F82E, N83R substitutions are indicated by double underline. The amino acid sequence of SEQ ID NO: 483 may optionally be provided with the lysine removed from the C-terminus. The G1Fc region may also comprise a mutation to an alanine at position 234 or a mutation to an alanine at position 235, or a combination thereof.

1 MDAMKRGLCC VLLLCGAVFV SPGASGRGEA ETRECIYYNA NWELERTNQS
51 GLERCEGEQD KRRHCYASWR NSSGTIELVK KGCWLDDERC YDRQECVATE
101 ENPQVYFCCC EGNFCNERFT HLPEAGGPEV TYEPPPTAPT GGGTHTCPPC
151 PAPELLGGPS VFLFPPKPKD TLMISRTPEV TCVVVDVSHE DPEVKFNWYV
201 DGVEVHNAKT KPREEQYNST YRVVSVLTVL HQDWLNGKEY KCKVSNKALP
251 APIEKTISKA KGQPREPQVY TLPPSREEMT KNQVSLTCLV KGFYPSDIAV
301 EWESNGQPEN NYKTTPPVLD SDGSFFLYSK LTVDKSRWQQ GNVFSCSVMH
351 EALHNHYTQK SLSLSPGK (SEQ ID NO: 483)

[0905] This ActRIIB(L57R, F82E, N83R)-G1Fc fusion polypeptide is encoded by the following nucleic acid sequence (SEQ ID NO: 484):

1 ATGGATGCAA TGAAGAGAGG GCTCTGCTGT GTGCTGCTGC TGTGTGGAGC
51 AGTCTTCGTT TCGCCCGGCG CCTCTGGGCG TGGGGAGGCT GAGACACGGG
101 AGTGCATCTA CTACAACGCC AACTGGGAGC TGGAGCGCAC CAACCAGAGC
151 GGCCTGGAGC GCTGCGAAGG CGAGCAGGAC AAGCGGAGGC ACTGCTACGC
201 CTCCTGGCGC AACAGCTCTG GCACCATCGA GCTCGTGAAG AAGGGCTGCT
251 GGCTAGATGA CGAGCGTTGC TACGATAGGC AGGAGTGTGT GGCCACTGAG
301 GAGAACCCCC AGGTGTACTT CTGCTGCTGT GAAGGCAACT TCTGCAACGA
351 GCGCTTCACT CATTTGCCAG AGGCTGGGGG CCCGGAAGTC ACGTACGAGC
401 CACCCCCGAC AGCCCCCACC GGTGGTGGAA CTCACACATG CCCACCGTGC
451 CCAGCACCTG AACTCCTGGG GGGACCGTCA GTCTTCCTCT TCCCCCCAAA
501 ACCCAAGGAC ACCCTCATGA TCTCCCGGAC CCCTGAGGTC ACATGCGTGG
551 TGGTGGACGT GAGCCACGAA GACCCTGAGG TCAAGTTCAA CTGGTACGTG
601 GACGGCGTGG AGGTGCATAA TGCCAAGACA AAGCCGCGGG AGGAGCAGTA
651 CAACAGCACG TACCGTGTGG TCAGCGTCCT CACCGTCCTG CACCAGGACT
701 GGCTGAATGG CAAGGAGTAC AAGTGCAAGG TCTCCAACAA AGCCCTCCCA
751 GCCCCCATCG AGAAAACCAT CTCCAAAGCC AAAGGGCAGC CCCGAGAACC
801 ACAGGTGTAC ACCCTGCCCC CATCCCGGGA GGAGATGACC AAGAACCAGG
851 TCAGCCTGAC CTGCCTGGTC AAAGGCTTCT ATCCCAGCGA CATCGCCGTG
901 GAGTGGGAGA GCAATGGGCA GCCGGAGAAC AACTACAAGA CCACGCCTCC
951 CGTGCTGGAC TCCGACGGCT CCTTCTTCCT CTATAGCAAG CTCACCGTGG
1001 ACAAGAGCAG GTGGCAGCAG GGGAACGTCT TCTCATGCTC CGTGATGCAT
1051 GAGGCTCTGC ACAACCACTA CACGCAGAAG AGCCTCTCCC TGTCTCCGGG
1101 TAAA (SEQ ID NO: 484)

[0906] A mature ActRIIB(L57R, F82E, N83R)-G1Fc fusion polypeptide (SEQ ID NO: 485) is as follows and may optionally be provided with the lysine removed from the C-terminus. The G1Fc region may also comprise a mutation to an alanine at position 234 or a mutation to an alanine at position 235, or a combination thereof.

1 GRGEAETREC IYYNANWELE RTNQSGLERC EGEQDKRRHC YASWRNSSGT
51 IELVKKGCWL DDERCYDRQE CVATEENPQV YFCCCEGNFC NERFTHLPEA
101 GGPEVTYEPP PTAPTGGGTH TCPPCPAPEL LGGPSVFLFP PKPKDTLMIS
151 RTPEVTCVVV DVSHEDPEVK FNWYVDGVEV HNAKTKPREE QYNSTYRVVS
201 VLTVLHQDWL NGKEYKCKVS NKALPAPIEK TISKAKGQPR EPQVYTLPPS
251 REEMTKNQVS LTCLVKGFYP SDIAVEWESN GQPENNYKTT PPVLDSDGSF
301 FLYSKLTVDK SRWQQGNVFS CSVMHEALHN HYTQKSLSLS PGK
(SEQ ID NO: 485)

[0907] The amino acid sequence of unprocessed ActRIIB(L57R, F82L, N83R)-G1Fc is shown below (SEQ ID NO: 486). The signal sequence and linker sequences are indicated by solid underline, and the L57R, F82L, N83R substitutions are indicated by double underline. The amino acid sequence of SEQ ID NO: 486 may optionally be provided with the lysine removed from the C-terminus. The G1Fc region may also comprise a mutation to an alanine at position 234 or a mutation to an alanine at position 235, or a combination thereof.

1 MDAMKRGLCC VLLLCGAVFV SPGASGRGEA ETRECIYYNA NWELERTNQS
51 GLERCEGEQD KRRHCYASWR NSSGTIELVK KGCWLDDLRC YDRQECVATE
101 ENPQVYFCCC EGNFCNERFT HLPEAGGPEV TYEPPPTAPT GGGTHTCPPC
151 PAPELLGGPS VFLFPPKPKD TLMISRTPEV TCVVVDVSHE DPEVKFNWYV
201 DGVEVHNAKT KPREEQYNST YRVVSVLTVL HQDWLNGKEY KCKVSNKALP
251 APIEKTISKA KGQPREPQVY TLPPSREEMT KNQVSLTCLV KGFYPSDIAV
301 EWESNGQPEN NYKTTPPVLD SDGSFFLYSK LTVDKSRWQQ GNVFSCSVMH
351 EALHNHYTQK SLSLSPGK (SEQ ID NO: 486)

[0908] This ActRIIB(L57R, F82L, N83R)-G1Fc fusion polypeptide is encoded by the following nucleic acid sequence (SEQ ID NO: 487):

1 ATGGATGCAA TGAAGAGAGG GCTCTGCTGT GTGCTGCTGC TGTGTGGAGC
51 AGTCTTCGTT TCGCCCGGCG CCTCTGGGCG TGGGGAGGCT GAGACACGGG
101 AGTGCATCTA CTACAACGCC AACTGGGAGC TGGAGCGCAC CAACCAGAGC
151 GGCCTGGAGC GCTGCGAAGG CGAGCAGGAC AAGCGGCGGC ACTGCTACGC
201 CTCCTGGCGC AACAGCTCTG GCACCATCGA GCTCGTGAAG AAGGGCTGCT
251 GGCTAGATGA CCTGCGGTGC TACGATAGGC AGGAGTGTGT GGCCACTGAG
301 GAGAACCCCC AGGTGTACTT CTGCTGCTGT GAAGGCAACT TCTGCAACGA
351 GCGCTTCACT CATTTGCCAG AGGCTGGGGG CCCGGAAGTC ACGTACGAGC
401 CACCCCCGAC AGCCCCCACC GGTGGTGGAA CTCACACATG CCCACCGTGC
451 CCAGCACCTG AACTCCTGGG GGGACCGTCA GTCTTCCTCT TCCCCCCAAA
501 ACCCAAGGAC ACCCTCATGA TCTCCCGGAC CCCTGAGGTC ACATGCGTGG
551 TGGTGGACGT GAGCCACGAA GACCCTGAGG TCAAGTTCAA CTGGTACGTG
601 GACGGCGTGG AGGTGCATAA TGCCAAGACA AAGCCGCGGG AGGAGCAGTA
651 CAACAGCACG TACCGTGTGG TCAGCGTCCT CACCGTCCTG CACCAGGACT
701 GGCTGAATGG CAAGGAGTAC AAGTGCAAGG TCTCCAACAA AGCCCTCCCA
751 GCCCCCATCG AGAAAACCAT CTCCAAAGCC AAAGGGCAGC CCCGAGAACC
801 ACAGGTGTAC ACCCTGCCCC CATCCCGGGA GGAGATGACC AAGAACCAGG
851 TCAGCCTGAC CTGCCTGGTC AAAGGCTTCT ATCCCAGCGA CATCGCCGTG
901 GAGTGGGAGA GCAATGGGCA GCCGGAGAAC AACTACAAGA CCACGCCTCC
951 CGTGCTGGAC TCCGACGGCT CCTTCTTCCT CTATAGCAAG CTCACCGTGG
1001 ACAAGAGCAG GTGGCAGCAG GGGAACGTCT TCTCATGCTC CGTGATGCAT
1051 GAGGCTCTGC ACAACCACTA CACGCAGAAG AGCCTCTCCC TGTCTCCGGG
1101 TAAA (SEQ ID NO: 487)

[0909] A mature ActRIIB(L57R, F82L, N83R)-G1Fc fusion polypeptide (SEQ ID NO: 488) is as follows and may optionally be provided with the lysine removed from the C-terminus. The G1Fc region may also comprise a mutation to an alanine at position 234 or a mutation to an alanine at position 235, or a combination thereof.

1 GRGEAETREC IYYNANWELE RTNQSGLERC EGEQDKRRHC YASWRNSSGT
51 IELVKKGCWL DDLRCYDRQE CVATEENPQV YFCCCEGNFC NERFTHLPEA
101 GGPEVTYEPP PTAPTGGGTH TCPPCPAPEL LGGPSVFLFP PKPKDTLMIS
151 RTPEVTCVVV DVSHEDPEVK FNWYVDGVEV HNAKTKPREE QYNSTYRVVS
201 VLTVLHQDWL NGKEYKCKVS NKALPAPIEK TISKAKGQPR EPQVYTLPPS
251 REEMTKNQVS LTCLVKGFYP SDIAVEWESN GQPENNYKTT PPVLDSDGSF
301 FLYSKLTVDK SRWQQGNVFS CSVMHEALHN HYTQKSLSLS PGK
(SEQ ID NO: 488)

[0910] The amino acid sequence of unprocessed ActRIIB(L57T, F82Y, N83R)-G1Fc is shown below (SEQ ID NO: 489). The signal sequence and linker sequences are indicated by solid underline, and the L57T, F82Y, N83R substitutions are indicated by double underline. The amino acid sequence of SEQ ID NO: 489 may optionally be provided with the lysine removed from the C-terminus. The G1Fc region may also comprise a mutation to an alanine at position 234 or a mutation to an alanine at position 235, or a combination thereof.

1 MDAMKRGLCC VLLLCGAVFV SPGASGRGEA ETRECIYYNA NWELERTNQS
51 GLERCEGEQD KRTHCYASWR NSSGTIELVK KGCWLDDYRC YDRQECVATE
101 ENPQVYFCCC EGNFCNERFT HLPEAGGPEV TYEPPPTAPT GGGTHTCPPC
151 PAPELLGGPS VFLFPPKPKD TLMISRTPEV TCVVVDVSHE DPEVKFNWYV
201 DGVEVHNAKT KPREEQYNST YRVVSVLTVL HQDWLNGKEY KCKVSNKALP
251 APIEKTISKA KGQPREPQVY TLPPSREEMT KNQVSLTCLV KGFYPSDIAV
301 EWESNGQPEN NYKTTPPVLD SDGSFFLYSK LTVDKSRWQQ GNVFSCSVMH
351 EALHNHYTQK SLSLSPGK (SEQ ID NO: 489)

[0911] This ActRIIB(L57T, F82Y, N83R)-G1Fc fusion polypeptide is encoded by the following nucleic acid sequence (SEQ ID NO: 490):

1 ATGGATGCAA TGAAGAGAGG GCTCTGCTGT GTGCTGCTGC TGTGTGGAGC
51 AGTCTTCGTT TCGCCCGGCG CCTCTGGGCG TGGGGAGGCT GAGACACGGG
101 AGTGCATCTA CTACAACGCC AACTGGGAGC TGGAGCGCAC CAACCAGAGC
151 GGCCTGGAGC GCTGCGAAGG CGAGCAGGAC AAGCGGACCC ACTGCTACGC
201 CTCCTGGCGC AACAGCTCTG GCACCATCGA GCTCGTGAAG AAGGGCTGCT
251 GGCTAGATGA CTACCGGTGC TACGATAGGC AGGAGTGTGT GGCCACTGAG
301 GAGAACCCCC AGGTGTACTT CTGCTGCTGT GAAGGCAACT TCTGCAACGA
351 GCGCTTCACT CATTTGCCAG AGGCTGGGGG CCCGGAAGTC ACGTACGAGC
401 CACCCCCGAC AGCCCCCACC GGTGGTGGAA CTCACACATG CCCACCGTGC
451 CCAGCACCTG AACTCCTGGG GGGACCGTCA GTCTTCCTCT TCCCCCCAAA
501 ACCCAAGGAC ACCCTCATGA TCTCCCGGAC CCCTGAGGTC ACATGCGTGG
551 TGGTGGACGT GAGCCACGAA GACCCTGAGG TCAAGTTCAA CTGGTACGTG
601 GACGGCGTGG AGGTGCATAA TGCCAAGACA AAGCCGCGGG AGGAGCAGTA
651 CAACAGCACG TACCGTGTGG TCAGCGTCCT CACCGTCCTG CACCAGGACT
701 GGCTGAATGG CAAGGAGTAC AAGTGCAAGG TCTCCAACAA AGCCCTCCCA
751 GCCCCCATCG AGAAAACCAT CTCCAAAGCC AAAGGGCAGC CCCGAGAACC
801 ACAGGTGTAC ACCCTGCCCC CATCCCGGGA GGAGATGACC AAGAACCAGG
851 TCAGCCTGAC CTGCCTGGTC AAAGGCTTCT ATCCCAGCGA CATCGCCGTG
901 GAGTGGGAGA GCAATGGGCA GCCGGAGAAC AACTACAAGA CCACGCCTCC
951 CGTGCTGGAC TCCGACGGCT CCTTCTTCCT CTATAGCAAG CTCACCGTGG
1001 ACAAGAGCAG GTGGCAGCAG GGGAACGTCT TCTCATGCTC CGTGATGCAT
1051 GAGGCTCTGC ACAACCACTA CACGCAGAAG AGCCTCTCCC TGTCTCCGGG
1101 TAAA (SEQ ID NO: 490)

[0912] A mature ActRIIB(L57T, F82Y, N83R)-G1Fc fusion polypeptide (SEQ ID NO: 491) is as follows and may optionally be provided with the lysine removed from the C-terminus. The G1Fc region may also comprise a mutation to an alanine at position 234 or a mutation to an alanine at position 235, or a combination thereof.

1 GRGEAETREC IYYNANWELE RTNQSGLERC EGEQDKRTHC YASWRNSSGT
51 IELVKKGCWL DDYRCYDRQE CVATEENPQV YFCCCEGNFC NERFTHLPEA
101 GGPEVTYEPP PTAPTGGGTH TCPPCPAPEL LGGPSVFLFP PKPKDTLMIS
151 RTPEVTCVVV DVSHEDPEVK FNWYVDGVEV HNAKTKPREE QYNSTYRVVS
201 VLTVLHQDWL NGKEYKCKVS NKALPAPIEK TISKAKGQPR EPQVYTLPPS
251 REEMTKNQVS LTCLVKGFYP SDIAVEWESN GQPENNYKTT PPVLDSDGSF
301 FLYSKLTVDK SRWQQGNVFS CSVMHEALHN HYTQKSLSLS PGK
(SEQ ID NO: 491)

[0913] The amino acid sequence of unprocessed ActRIIB(L57V, F82D, N83R)-G1Fc is shown below (SEQ ID NO: 492). The signal sequence and linker sequences are indicated by solid underline, and the L57V, F82D, N83R substitutions are indicated by double underline. The amino acid sequence of SEQ ID NO: 492 may optionally be provided with the lysine removed from the C-terminus. The G1Fc region may also comprise a mutation to an alanine at position 234 or a mutation to an alanine at position 235, or a combination thereof.

1 MDAMKRGLCC VLLLCGAVFV SPGASGRGEA ETRECIYYNA NWELERTNQS
51 GLERCEGEQD KRVHCYASWR NSSGTIELVK KGCWLDDDRC YDRQECVATE
101 ENPQVYFCCC EGNFCNERFT HLPEAGGPEV TYEPPPTAPT GGGTHTCPPC
151 PAPELLGGPS VFLFPPKPKD TLMISRTPEV TCVVVDVSHE DPEVKFNWYV
201 DGVEVHNAKT KPREEQYNST YRVVSVLTVL HQDWLNGKEY KCKVSNKALP
251 APIEKTISKA KGQPREPQVY TLPPSREEMT KNQVSLTCLV KGFYPSDIAV
301 EWESNGQPEN NYKTTPPVLD SDGSFFLYSK LTVDKSRWQQ GNVFSCSVMH
351 EALHNHYTQK SLSLSPGK (SEQ ID NO: 492)

[0914] This ActRIIB(L57V, F82D, N83R)-G1Fc fusion polypeptide is encoded by the following nucleic acid sequence (SEQ ID NO: 493):

1 ATGGATGCAA TGAAGAGAGG GCTCTGCTGT GTGCTGCTGC TGTGTGGAGC
51 AGTCTTCGTT TCGCCCGGCG CCTCTGGGCG TGGGGAGGCT GAGACACGGG
101 AGTGCATCTA CTACAACGCC AACTGGGAGC TGGAGCGCAC CAACCAGAGC
151 GGCCTGGAGC GCTGCGAAGG CGAGCAGGAC AAGCGGGTGC ACTGCTACGC
201 CTCCTGGCGC AACAGCTCTG GCACCATCGA GCTCGTGAAG AAGGGCTGCT
251 GGCTAGATGA CGACCGTTGC TACGATAGGC AGGAGTGTGT GGCCACTGAG
301 GAGAACCCCC AGGTGTACTT CTGCTGCTGT GAAGGCAACT TCTGCAACGA
351 GCGCTTCACT CATTTGCCAG AGGCTGGGGG CCCGGAAGTC ACGTACGAGC
401 CACCCCCGAC AGCCCCCACC GGTGGTGGAA CTCACACATG CCCACCGTGC
451 CCAGCACCTG AACTCCTGGG GGGACCGTCA GTCTTCCTCT TCCCCCCAAA
501 ACCCAAGGAC ACCCTCATGA TCTCCCGGAC CCCTGAGGTC ACATGCGTGG
551 TGGTGGACGT GAGCCACGAA GACCCTGAGG TCAAGTTCAA CTGGTACGTG
601 GACGGCGTGG AGGTGCATAA TGCCAAGACA AAGCCGCGGG AGGAGCAGTA
651 CAACAGCACG TACCGTGTGG TCAGCGTCCT CACCGTCCTG CACCAGGACT
701 GGCTGAATGG CAAGGAGTAC AAGTGCAAGG TCTCCAACAA AGCCCTCCCA
751 GCCCCCATCG AGAAAACCAT CTCCAAAGCC AAAGGGCAGC CCCGAGAACC
801 ACAGGTGTAC ACCCTGCCCC CATCCCGGGA GGAGATGACC AAGAACCAGG
851 TCAGCCTGAC CTGCCTGGTC AAAGGCTTCT ATCCCAGCGA CATCGCCGTG
901 GAGTGGGAGA GCAATGGGCA GCCGGAGAAC AACTACAAGA CCACGCCTCC
951 CGTGCTGGAC TCCGACGGCT CCTTCTTCCT CTATAGCAAG CTCACCGTGG
1001 ACAAGAGCAG GTGGCAGCAG GGGAACGTCT TCTCATGCTC CGTGATGCAT
1051 GAGGCTCTGC ACAACCACTA CACGCAGAAG AGCCTCTCCC TGTCTCCGGG
1101 TAAA (SEQ ID NO: 493)

[0915] A mature ActRIIB(L57V, F82D, N83R)-G1Fc fusion polypeptide (SEQ ID NO: 494) is as follows and may optionally be provided with the lysine removed from the C-terminus. The G1Fc region may also comprise a mutation to an alanine at position 234 or a mutation to an alanine at position 235, or a combination thereof.

1 GRGEAETREC IYYNANWELE RTNQSGLERC EGEQDKRVHC YASWRNSSGT
51 IELVKKGCWL DDDRCYDRQE CVATEENPQV YFCCCEGNFC NERFTHLPEA
101 GGPEVTYEPP PTAPTGGGTH TCPPCPAPEL LGGPSVFLFP PKPKDTLMIS
151 RTPEVTCVVV DVSHEDPEVK FNWYVDGVEV HNAKTKPREE QYNSTYRVVS
201 VLTVLHQDWL NGKEYKCKVS NKALPAPIEK TISKAKGQPR EPQVYTLPPS
251 REEMTKNQVS LTCLVKGFYP SDIAVEWESN GQPENNYKTT PPVLDSDGSF
301 FLYSKLTVDK SRWQQGNVFS CSVMHEALHN HYTQKSLSLS PGK
(SEQ ID NO: 494)

[0916] The amino acid sequence of unprocessed ActRIIB(L57V, F82Y, N83R)-G1Fc is shown below (SEQ ID NO: 495). The signal sequence and linker sequences are indicated by solid underline, and the L57V, F82Y, N83R substitutions are indicated by double underline. The amino acid sequence of SEQ ID NO: 495 may optionally be provided with the lysine removed from the C-terminus. The G1Fc region may also comprise a mutation to an alanine at position 234 or a mutation to an alanine at position 235, or a combination thereof.

1 MDAMKRGLCC VLLLCGAVFV SPGASGRGEA ETRECIYYNA NWELERTNQS
51 GLERCEGEQD KRVHCYASWR NSSGTIELVK KGCWLDDYRC YDRQECVATE
101 ENPQVYFCCC EGNFCNERFT HLPEAGGPEV TYEPPPTAPT GGGTHTCPPC
151 PAPELLGGPS VFLFPPKPKD TLMISRTPEV TCVVVDVSHE DPEVKFNWYV
201 DGVEVHNAKT KPREEQYNST YRVVSVLTVL HQDWLNGKEY KCKVSNKALP
251 APIEKTISKA KGQPREPQVY TLPPSREEMT KNQVSLTCLV KGFYPSDIAV
301 EWESNGQPEN NYKTTPPVLD SDGSFFLYSK LTVDKSRWQQ GNVFSCSVMH
351 EALHNHYTQK SLSLSPGK (SEQ ID NO: 495)

[0917] This ActRIIB(L57V, F82Y, N83R)-G1Fc fusion polypeptide is encoded by the following nucleic acid sequence (SEQ ID NO: 496):

1 ATGGATGCAA TGAAGAGAGG GCTCTGCTGT GTGCTGCTGC TGTGTGGAGC
51 AGTCTTCGTT TCGCCCGGCG CCTCTGGGCG TGGGGAGGCT GAGACACGGG
101 AGTGCATCTA CTACAACGCC AACTGGGAGC TGGAGCGCAC CAACCAGAGC
151 GGCCTGGAGC GCTGCGAAGG CGAGCAGGAC AAGCGGGTGC ACTGCTACGC
201 CTCCTGGCGC AACAGCTCTG GCACCATCGA GCTCGTGAAG AAGGGCTGCT
251 GGCTAGATGA CTACCGTTGC TACGATAGGC AGGAGTGTGT GGCCACTGAG
301 GAGAACCCCC AGGTGTACTT CTGCTGCTGT GAAGGCAACT TCTGCAACGA
351 GCGCTTCACT CATTTGCCAG AGGCTGGGGG CCCGGAAGTC ACGTACGAGC
401 CACCCCCGAC AGCCCCCACC GGTGGTGGAA CTCACACATG CCCACCGTGC
451 CCAGCACCTG AACTCCTGGG GGGACCGTCA GTCTTCCTCT TCCCCCCAAA
501 ACCCAAGGAC ACCCTCATGA TCTCCCGGAC CCCTGAGGTC ACATGCGTGG
551 TGGTGGACGT GAGCCACGAA GACCCTGAGG TCAAGTTCAA CTGGTACGTG
601 GACGGCGTGG AGGTGCATAA TGCCAAGACA AAGCCGCGGG AGGAGCAGTA
651 CAACAGCACG TACCGTGTGG TCAGCGTCCT CACCGTCCTG CACCAGGACT
701 GGCTGAATGG CAAGGAGTAC AAGTGCAAGG TCTCCAACAA AGCCCTCCCA
751 GCCCCCATCG AGAAAACCAT CTCCAAAGCC AAAGGGCAGC CCCGAGAACC
801 ACAGGTGTAC ACCCTGCCCC CATCCCGGGA GGAGATGACC AAGAACCAGG
851 TCAGCCTGAC CTGCCTGGTC AAAGGCTTCT ATCCCAGCGA CATCGCCGTG
901 GAGTGGGAGA GCAATGGGCA GCCGGAGAAC AACTACAAGA CCACGCCTCC
951 CGTGCTGGAC TCCGACGGCT CCTTCTTCCT CTATAGCAAG CTCACCGTGG
1001 ACAAGAGCAG GTGGCAGCAG GGGAACGTCT TCTCATGCTC CGTGATGCAT
1051 GAGGCTCTGC ACAACCACTA CACGCAGAAG AGCCTCTCCC TGTCTCCGGG
1101 TAAA (SEQ ID NO: 496)

[0918] A mature ActRIIB(L57V, F82Y, N83R)-G1Fc fusion polypeptide (SEQ ID NO: 497) is as follows and may optionally be provided with the lysine removed from the C-terminus. The G1Fc region may also comprise a mutation to an alanine at position 234 or a mutation to an alanine at position 235, or a combination thereof.

1 GRGEAETREC IYYNANWELE RTNQSGLERC EGEQDKRVHC YASWRNSSGT
51 IELVKKGCWL DDYRCYDRQE CVATEENPQV YFCCCEGNFC NERFTHLPEA
101 GGPEVTYEPP PTAPTGGGTH TCPPCPAPEL LGGPSVFLFP PKPKDTLMIS
151 RTPEVTCVVV DVSHEDPEVK FNWYVDGVEV HNAKTKPREE QYNSTYRVVS
201 VLTVLHQDWL NGKEYKCKVS NKALPAPIEK TISKAKGQPR EPQVYTLPPS
251 REEMTKNQVS LTCLVKGFYP SDIAVEWESN GQPENNYKTT PPVLDSDGSF
301 FLYSKLTVDK SRWQQGNVFS CSVMHEALHN HYTQKSLSLS PGK
(SEQ ID NO: 497)

[0919] The amino acid sequence of unprocessed ActRIIB(G68R, W78Y, F82Y)-G1Fc is shown below (SEQ ID NO: 498). The signal sequence and linker sequences are indicated by solid underline, and the G68R, W78Y, F82Y substitutions are indicated by double underline. The amino acid sequence of SEQ ID NO: 498 may optionally be provided with the lysine removed from the C-terminus. The G1Fc region may also comprise a mutation to an alanine at position 234 or a mutation to an alanine at position 235, or a combination thereof.

1 MDAMKRGLCC VLLLCGAVFV SPGASGRGEA ETRECIYYNA NWELERTNQS
51 GLERCEGEQD KRLHCYASWR NSSRTIELVK KGCYLDDYNC YDRQECVATE
101 ENPQVYFCCC EGNFCNERFT HLPEAGGPEV TYEPPPTAPT GGGTHTCPPC
151 PAPELLGGPS VFLFPPKPKD TLMISRTPEV TCVVVDVSHE DPEVKFNWYV
201 DGVEVHNAKT KPREEQYNST YRVVSVLTVL HQDWLNGKEY KCKVSNKALP
251 APIEKTISKA KGQPREPQVY TLPPSREEMT KNQVSLTCLV KGFYPSDIAV
301 EWESNGQPEN NYKTTPPVLD SDGSFFLYSK LTVDKSRWQQ GNVFSCSVMH
351 EALHNHYTQK SLSLSPGK (SEQ ID NO: 498)

[0920] This ActRIIB(G68R, W78Y, F82Y)-G1Fc fusion polypeptide is encoded by the following nucleic acid sequence (SEQ ID NO: 499):

1 ATGGATGCAA TGAAGAGAGG GCTCTGCTGT GTGCTGCTGC TGTGTGGAGC
51 AGTCTTCGTT TCGCCCGGCG CCTCTGGGCG TGGGGAGGCT GAGACACGGG
101 AGTGCATCTA CTACAACGCC AACTGGGAGC TGGAGCGCAC CAACCAGAGC
151 GGCCTGGAGC GCTGCGAAGG CGAGCAGGAC AAGCGGCTGC ACTGCTACGC
201 CTCCTGGCGC AACAGCTCTC GGACCATCGA GCTCGTGAAG AAGGGCTGCT
251 ACCTAGATGA CTACAACTGC TACGATAGGC AGGAGTGTGT GGCCACTGAG
301 GAGAACCCCC AGGTGTACTT CTGCTGCTGT GAAGGCAACT TCTGCAACGA
351 GCGCTTCACT CATTTGCCAG AGGCTGGGGG CCCGGAAGTC ACGTACGAGC
401 CACCCCCGAC AGCCCCCACC GGTGGTGGAA CTCACACATG CCCACCGTGC
451 CCAGCACCTG AACTCCTGGG GGGACCGTCA GTCTTCCTCT TCCCCCCAAA
501 ACCCAAGGAC ACCCTCATGA TCTCCCGGAC CCCTGAGGTC ACATGCGTGG
551 TGGTGGACGT GAGCCACGAA GACCCTGAGG TCAAGTTCAA CTGGTACGTG
601 GACGGCGTGG AGGTGCATAA TGCCAAGACA AAGCCGCGGG AGGAGCAGTA
651 CAACAGCACG TACCGTGTGG TCAGCGTCCT CACCGTCCTG CACCAGGACT
701 GGCTGAATGG CAAGGAGTAC AAGTGCAAGG TCTCCAACAA AGCCCTCCCA
751 GCCCCCATCG AGAAAACCAT CTCCAAAGCC AAAGGGCAGC CCCGAGAACC
801 ACAGGTGTAC ACCCTGCCCC CATCCCGGGA GGAGATGACC AAGAACCAGG
851 TCAGCCTGAC CTGCCTGGTC AAAGGCTTCT ATCCCAGCGA CATCGCCGTG
901 GAGTGGGAGA GCAATGGGCA GCCGGAGAAC AACTACAAGA CCACGCCTCC
951 CGTGCTGGAC TCCGACGGCT CCTTCTTCCT CTATAGCAAG CTCACCGTGG
1001 ACAAGAGCAG GTGGCAGCAG GGGAACGTCT TCTCATGCTC CGTGATGCAT
1051 GAGGCTCTGC ACAACCACTA CACGCAGAAG AGCCTCTCCC TGTCTCCGGG
1101 TAAA (SEQ ID NO: 499)

[0921] A mature ActRIIB(G68R, W78Y, F82Y)-G1Fc fusion polypeptide (SEQ ID NO: 500) is as follows and may optionally be provided with the lysine removed from the C-terminus. The G1Fc region may also comprise a mutation to an alanine at position 234 or a mutation to an alanine at position 235, or a combination thereof.

1 GRGEAETREC IYYNANWELE RTNQSGLERC EGEQDKRLHC YASWRNSSRT
51 IELVKKGCYL DDYNCYDRQE CVATEENPQV YFCCCEGNFC NERFTHLPEA
101 GGPEVTYEPP PTAPTGGGTH TCPPCPAPEL LGGPSVFLFP PKPKDTLMIS
151 RTPEVTCVVV DVSHEDPEVK FNWYVDGVEV HNAKTKPREE QYNSTYRVVS
201 VLTVLHQDWL NGKEYKCKVS NKALPAPIEK TISKAKGQPR EPQVYTLPPS
251 REEMTKNQVS LTCLVKGFYP SDIAVEWESN GQPENNYKTT PPVLDSDGSF
301 FLYSKLTVDK SRWQQGNVFS CSVMHEALHN HYTQKSLSLS PGK
(SEQ ID NO: 500)

[0922] The amino acid sequence of unprocessed ActRIIB(G68R, F82S, N83R)-G1Fc is shown below (SEQ ID NO: 501). The signal sequence and linker sequences are indicated by solid underline, and the G68R, F82S, N83R substitutions are indicated by double underline. The amino acid sequence of SEQ ID NO: 501 may optionally be provided with the lysine removed from the C-terminus. The G1Fc region may also comprise a mutation to an alanine at position 234 or a mutation to an alanine at position 235, or a combination thereof.

1 MDAMKRGLCC VLLLCGAVFV SPGASGRGEA ETRECIYYNA NWELERTNQS
51 GLERCEGEQD KRLHCYASWR NSSRTIELVK KGCWLDDSRC YDRQECVATE
101 ENPQVYFCCC EGNFCNERFT HLPEAGGPEV TYEPPPTAPT GGGTHTCPPC
151 PAPELLGGPS VFLFPPKPKD TLMISRTPEV TCVVVDVSHE DPEVKFNWYV
201 DGVEVHNAKT KPREEQYNST YRVVSVLTVL HQDWLNGKEY KCKVSNKALP
251 APIEKTISKA KGQPREPQVY TLPPSREEMT KNQVSLTCLV KGFYPSDIAV
301 EWESNGQPEN NYKTTPPVLD SDGSFFLYSK LTVDKSRWQQ GNVFSCSVMH
351 EALHNHYTQK SLSLSPGK (SEQ ID NO: 501)

[0923] This ActRIIB(G68R, F82S, N83R)-G1Fc fusion polypeptide is encoded by the following nucleic acid sequence (SEQ ID NO: 502):

1 ATGGATGCAA TGAAGAGAGG GCTCTGCTGT GTGCTGCTGC TGTGTGGAGC
51 AGTCTTCGTT TCGCCCGGCG CCTCTGGGCG TGGGGAGGCT GAGACACGGG
101 AGTGCATCTA CTACAACGCC AACTGGGAGC TGGAGCGCAC CAACCAGAGC
151 GGCCTGGAGC GCTGCGAAGG CGAGCAGGAC AAGCGGCTGC ACTGCTACGC
201 CTCCTGGCGC AACAGCTCTA GGACCATCGA GCTCGTGAAG AAGGGCTGCT
251 GGCTAGATGA CTCCCGTTGC TACGATAGGC AGGAGTGTGT GGCCACTGAG
301 GAGAACCCCC AGGTGTACTT CTGCTGCTGT GAAGGCAACT TCTGCAACGA
351 GCGCTTCACT CATTTGCCAG AGGCTGGGGG CCCGGAAGTC ACGTACGAGC
401 CACCCCCGAC AGCCCCCACC GGTGGTGGAA CTCACACATG CCCACCGTGC
451 CCAGCACCTG AACTCCTGGG GGGACCGTCA GTCTTCCTCT TCCCCCCAAA
501 ACCCAAGGAC ACCCTCATGA TCTCCCGGAC CCCTGAGGTC ACATGCGTGG
551 TGGTGGACGT GAGCCACGAA GACCCTGAGG TCAAGTTCAA CTGGTACGTG
601 GACGGCGTGG AGGTGCATAA TGCCAAGACA AAGCCGCGGG AGGAGCAGTA
651 CAACAGCACG TACCGTGTGG TCAGCGTCCT CACCGTCCTG CACCAGGACT
701 GGCTGAATGG CAAGGAGTAC AAGTGCAAGG TCTCCAACAA AGCCCTCCCA
751 GCCCCCATCG AGAAAACCAT CTCCAAAGCC AAAGGGCAGC CCCGAGAACC
801 ACAGGTGTAC ACCCTGCCCC CATCCCGGGA GGAGATGACC AAGAACCAGG
851 TCAGCCTGAC CTGCCTGGTC AAAGGCTTCT ATCCCAGCGA CATCGCCGTG
901 GAGTGGGAGA GCAATGGGCA GCCGGAGAAC AACTACAAGA CCACGCCTCC
951 CGTGCTGGAC TCCGACGGCT CCTTCTTCCT CTATAGCAAG CTCACCGTGG
1001 ACAAGAGCAG GTGGCAGCAG GGGAACGTCT TCTCATGCTC CGTGATGCAT
1051 GAGGCTCTGC ACAACCACTA CACGCAGAAG AGCCTCTCCC TGTCTCCGGG
1101 TAAA (SEQ ID NO: 502)

[0924] A mature ActRIIB(G68R, F82S, N83R)-G1Fc fusion polypeptide (SEQ ID NO: 503) is as follows and may optionally be provided with the lysine removed from the C-terminus. The G1Fc region may also comprise a mutation to an alanine at position 234 or a mutation to an alanine at position 235, or a combination thereof.

1 GRGEAETREC IYYNANWELE RTNQSGLERC EGEQDKRLHC YASWRNSSRT
51 IELVKKGCWL DDSRCYDRQE CVATEENPQV YFCCCEGNFC NERFTHLPEA
101 GGPEVTYEPP PTAPTGGGTH TCPPCPAPEL LGGPSVFLFP PKPKDTLMIS
151 RTPEVTCVVV DVSHEDPEVK FNWYVDGVEV HNAKTKPREE QYNSTYRVVS
201 VLTVLHQDWL NGKEYKCKVS NKALPAPIEK TISKAKGQPR EPQVYTLPPS
251 REEMTKNQVS LTCLVKGFYP SDIAVEWESN GQPENNYKTT PPVLDSDGSF
301 FLYSKLTVDK SRWQQGNVFS CSVMHEALHN HYTQKSLSLS PGK
(SEQ ID NO: 503)

[0925] The amino acid sequence of unprocessed ActRIIB(E52N, G68R, F82Y, N83R)-G1Fc is shown below (SEQ ID NO: 504). The signal sequence and linker sequences are indicated by solid underline, and the E52N, G68R, F82Y, N83R substitutions are indicated by double underline. The amino acid sequence of SEQ ID NO: 504 may optionally be provided with the lysine removed from the C-terminus. The G1Fc region may also comprise a mutation to an alanine at position 234 or a mutation to an alanine at position 235, or a combination thereof.

1 MDAMKRGLCC VLLLCGAVFV SPGASGRGEA ETRECIYYNA NWELERTNQS
51 GLERCEGNQD KRLHCYASWR NSSRTIELVK KGCWLDDYRC YDRQECVATE
101 ENPQVYFCCC EGNFCNERFT HLPEAGGPEV TYEPPPTAPT GGGTHTCPPC
151 PAPELLGGPS VFLFPPKPKD TLMISRTPEV TCVVVDVSHE DPEVKFNWYV
201 DGVEVHNAKT KPREEQYNST YRVVSVLTVL HQDWLNGKEY KCKVSNKALP
251 APIEKTISKA KGQPREPQVY TLPPSREEMT KNQVSLTCLV KGFYPSDIAV
301 EWESNGQPEN NYKTTPPVLD SDGSFFLYSK LTVDKSRWQQ GNVFSCSVMH
351 EALHNHYTQK SLSLSPGK (SEQ ID NO: 504)

[0926] This ActRIIB(E52N, G68R, F82Y, N83R)-G1Fc fusion polypeptide is encoded by the following nucleic acid sequence (SEQ ID NO: 505):

1 ATGGATGCAA TGAAGAGAGG GCTCTGCTGT GTGCTGCTGC TGTGTGGAGC
51 AGTCTTCGTT TCGCCCGGCG CCTCTGGGCG TGGGGAGGCT GAGACACGGG
101 AGTGCATCTA CTACAACGCC AACTGGGAGC TGGAGCGCAC CAACCAGAGC
151 GGCCTGGAGC GCTGCGAAGG CAACCAGGAC AAGCGGCTGC ACTGCTACGC
201 CTCCTGGCGC AACAGCTCTC GGACCATCGA GCTCGTGAAG AAGGGCTGCT
251 GGCTAGATGA CTACCGGTGC TACGATAGGC AGGAGTGTGT GGCCACTGAG
301 GAGAACCCCC AGGTGTACTT CTGCTGCTGT GAAGGCAACT TCTGCAACGA
351 GCGCTTCACT CATTTGCCAG AGGCTGGGGG CCCGGAAGTC ACGTACGAGC
401 CACCCCCGAC AGCCCCCACC GGTGGTGGAA CTCACACATG CCCACCGTGC
451 CCAGCACCTG AACTCCTGGG GGGACCGTCA GTCTTCCTCT TCCCCCCAAA
501 ACCCAAGGAC ACCCTCATGA TCTCCCGGAC CCCTGAGGTC ACATGCGTGG
551 TGGTGGACGT GAGCCACGAA GACCCTGAGG TCAAGTTCAA CTGGTACGTG
601 GACGGCGTGG AGGTGCATAA TGCCAAGACA AAGCCGCGGG AGGAGCAGTA
651 CAACAGCACG TACCGTGTGG TCAGCGTCCT CACCGTCCTG CACCAGGACT
701 GGCTGAATGG CAAGGAGTAC AAGTGCAAGG TCTCCAACAA AGCCCTCCCA
751 GCCCCCATCG AGAAAACCAT CTCCAAAGCC AAAGGGCAGC CCCGAGAACC
801 ACAGGTGTAC ACCCTGCCCC CATCCCGGGA GGAGATGACC AAGAACCAGG
851 TCAGCCTGAC CTGCCTGGTC AAAGGCTTCT ATCCCAGCGA CATCGCCGTG
901 GAGTGGGAGA GCAATGGGCA GCCGGAGAAC AACTACAAGA CCACGCCTCC
951 CGTGCTGGAC TCCGACGGCT CCTTCTTCCT CTATAGCAAG CTCACCGTGG
1001 ACAAGAGCAG GTGGCAGCAG GGGAACGTCT TCTCATGCTC CGTGATGCAT
1051 GAGGCTCTGC ACAACCACTA CACGCAGAAG AGCCTCTCCC TGTCTCCGGG
1101 TAAA (SEQ ID NO: 505)

[0927] A mature ActRIIB(E52N, G68R, F82Y, N83R)-G1Fc fusion polypeptide (SEQ ID NO: 506) is as follows and may optionally be provided with the lysine removed from the C-terminus. The G1Fc region may also comprise a mutation to an alanine at position 234 or a mutation to an alanine at position 235, or a combination thereof.

1 GRGEAETREC IYYNANWELE RTNQSGLERC EGNQDKRLHC YASWRNSSRT
51 IELVKKGCWL DDYRCYDRQE CVATEENPQV YFCCCEGNFC NERFTHLPEA
101 GGPEVTYEPP PTAPTGGGTH TCPPCPAPEL LGGPSVFLFP PKPKDTLMIS
151 RTPEVTCVVV DVSHEDPEVK FNWYVDGVEV HNAKTKPREE QYNSTYRVVS
201 VLTVLHQDWL NGKEYKCKVS NKALPAPIEK TISKAKGQPR EPQVYTLPPS
251 REEMTKNQVS LTCLVKGFYP SDIAVEWESN GQPENNYKTT PPVLDSDGSF
301 FLYSKLTVDK SRWQQGNVFS CSVMHEALHN HYTQKSLSLS PGK
(SEQ ID NO: 506)

[0928] The amino acid sequence of unprocessed ActRIIB(G68R, L79E, F82T, N83R)-G1Fc is shown below (SEQ ID NO: 507). The signal sequence and linker sequences are indicated by solid underline, and the G68R, L79E, F82T, N83R substitutions are indicated by double underline. The amino acid sequence of SEQ ID NO: 507 may optionally be provided with the lysine removed from the C-terminus. The G1Fc region may also comprise a mutation to an alanine at position 234 or a mutation to an alanine at position 235, or a combination thereof.

1 MDAMKRGLCC VLLLCGAVFV SPGASGRGEA ETRECIYYNA NWELERTNQS
51 GLERCEGEQD KRLHCYASWR NSSRTIELVK KGCWEDDTRC YDRQECVATE
101 ENPQVYFCCC EGNFCNERFT HLPEAGGPEV TYEPPPTAPT GGGTHTCPPC
151 PAPELLGGPS VFLFPPKPKD TLMISRTPEV TCVVVDVSHE DPEVKFNWYV
201 DGVEVHNAKT KPREEQYNST YRVVSVLTVL HQDWLNGKEY KCKVSNKALP
251 APIEKTISKA KGQPREPQVY TLPPSREEMT KNQVSLTCLV KGFYPSDIAV
301 EWESNGQPEN NYKTTPPVLD SDGSFFLYSK LTVDKSRWQQ GNVFSCSVMH
351 EALHNHYTQK SLSLSPGK (SEQ ID NO: 507)

[0929] This ActRIIB(G68R, L79E, F82T, N83R)-G1Fc fusion polypeptide is encoded by the following nucleic acid sequence (SEQ ID NO: 508):

1 ATGGATGCAA TGAAGAGAGG GCTCTGCTGT GTGCTGCTGC TGTGTGGAGC
51 AGTCTTCGTT TCGCCCGGCG CCTCTGGGCG TGGGGAGGCT GAGACACGGG
101 AGTGCATCTA CTACAACGCC AACTGGGAGC TGGAGCGCAC CAACCAGAGC
151 GGCCTGGAGC GCTGCGAAGG CGAGCAGGAC AAGCGGCTGC ACTGCTACGC
201 CTCCTGGCGC AACAGCTCTA GGACCATCGA GCTCGTGAAG AAGGGCTGCT
251 GGGAGGATGA CACCCGTTGC TACGATAGGC AGGAGTGTGT GGCCACTGAG
301 GAGAACCCCC AGGTGTACTT CTGCTGCTGT GAAGGCAACT TCTGCAACGA
351 GCGCTTCACT CATTTGCCAG AGGCTGGGGG CCCGGAAGTC ACGTACGAGC
401 CACCCCCGAC AGCCCCCACC GGTGGTGGAA CTCACACATG CCCACCGTGC
451 CCAGCACCTG AACTCCTGGG GGGACCGTCA GTCTTCCTCT TCCCCCCAAA
501 ACCCAAGGAC ACCCTCATGA TCTCCCGGAC CCCTGAGGTC ACATGCGTGG
551 TGGTGGACGT GAGCCACGAA GACCCTGAGG TCAAGTTCAA CTGGTACGTG
601 GACGGCGTGG AGGTGCATAA TGCCAAGACA AAGCCGCGGG AGGAGCAGTA
651 CAACAGCACG TACCGTGTGG TCAGCGTCCT CACCGTCCTG CACCAGGACT
701 GGCTGAATGG CAAGGAGTAC AAGTGCAAGG TCTCCAACAA AGCCCTCCCA
751 GCCCCCATCG AGAAAACCAT CTCCAAAGCC AAAGGGCAGC CCCGAGAACC
801 ACAGGTGTAC ACCCTGCCCC CATCCCGGGA GGAGATGACC AAGAACCAGG
851 TCAGCCTGAC CTGCCTGGTC AAAGGCTTCT ATCCCAGCGA CATCGCCGTG
901 GAGTGGGAGA GCAATGGGCA GCCGGAGAAC AACTACAAGA CCACGCCTCC
951 CGTGCTGGAC TCCGACGGCT CCTTCTTCCT CTATAGCAAG CTCACCGTGG
1001 ACAAGAGCAG GTGGCAGCAG GGGAACGTCT TCTCATGCTC CGTGATGCAT
1051 GAGGCTCTGC ACAACCACTA CACGCAGAAG AGCCTCTCCC TGTCTCCGGG
1101 TAAA (SEQ ID NO: 508)

[0930] A mature ActRIIB(G68R, L79E, F82T, N83R)-G1Fc fusion polypeptide (SEQ ID NO: 509) is as follows and may optionally be provided with the lysine removed from the C-terminus. The G1Fc region may also comprise a mutation to an alanine at position 234 or a mutation to an alanine at position 235, or a combination thereof.

1 GRGEAETREC IYYNANWELE RTNQSGLERC EGEQDKRLHC YASWRNSSRT
51 IELVKKGCWE DDTRCYDRQE CVATEENPQV YFCCCEGNFC NERFTHLPEA
101 GGPEVTYEPP PTAPTGGGTH TCPPCPAPEL LGGPSVFLFP PKPKDTLMIS
151 RTPEVTCVVV DVSHEDPEVK FNWYVDGVEV HNAKTKPREE QYNSTYRVVS
201 VLTVLHQDWL NGKEYKCKVS NKALPAPIEK TISKAKGQPR EPQVYTLPPS
251 REEMTKNQVS LTCLVKGFYP SDIAVEWESN GQPENNYKTT PPVLDSDGSF
301 FLYSKLTVDK SRWQQGNVFS CSVMHEALHN HYTQKSLSLS PGK
(SEQ ID NO: 509)

[0931] The amino acid sequence of unprocessed ActRIIB(G68R, L79E, F82Y, N83R)-G1Fc is shown below (SEQ ID NO: 510). The signal sequence and linker sequences are indicated by solid underline, and the G68R, L79E, F82Y, N83R substitutions are indicated by double underline. The amino acid sequence of SEQ ID NO: 510 may optionally be provided with the lysine removed from the C-terminus. The G1Fc region may also comprise a mutation to an alanine at position 234 or a mutation to an alanine at position 235, or a combination thereof.

1 MDAMKRGLCC VLLLCGAVFV SPGASGRGEA ETRECIYYNA NWELERTNQS
51 GLERCEGEQD KRLHCYASWR NSSRTIELVK KGCWEDDYRC YDRQECVATE
101 ENPQVYFCCC EGNFCNERFT HLPEAGGPEV TYEPPPTAPT GGGTHTCPPC
151 PAPELLGGPS VFLFPPKPKD TLMISRTPEV TCVVVDVSHE DPEVKFNWYV
201 DGVEVHNAKT KPREEQYNST YRVVSVLTVL HQDWLNGKEY KCKVSNKALP
251 APIEKTISKA KGQPREPQVY TLPPSREEMT KNQVSLTCLV KGFYPSDIAV
301 EWESNGQPEN NYKTTPPVLD SDGSFFLYSK LTVDKSRWQQ GNVFSCSVMH
351 EALHNHYTQK SLSLSPGK (SEQ ID NO: 510)

[0932] This ActRIIB(G68R, L79E, F82Y, N83R)-G1Fc fusion polypeptide is encoded by the following nucleic acid sequence (SEQ ID NO: 511):

1 ATGGATGCAA TGAAGAGAGG GCTCTGCTGT GTGCTGCTGC TGTGTGGAGC
51 AGTCTTCGTT TCGCCCGGCG CCTCTGGGCG TGGGGAGGCT GAGACACGGG
101 AGTGCATCTA CTACAACGCC AACTGGGAGC TGGAGCGCAC CAACCAGAGC
151 GGCCTGGAGC GCTGCGAAGG CGAGCAGGAC AAGCGGCTGC ACTGCTACGC
201 CTCCTGGCGC AACAGCTCTC GGACCATCGA GCTCGTGAAG AAGGGCTGCT
251 GGGAAGATGA CTACCGGTGC TACGATAGGC AGGAGTGTGT GGCCACTGAG
301 GAGAACCCCC AGGTGTACTT CTGCTGCTGT GAAGGCAACT TCTGCAACGA
351 GCGCTTCACT CATTTGCCAG AGGCTGGGGG CCCGGAAGTC ACGTACGAGC
401 CACCCCCGAC AGCCCCCACC GGTGGTGGAA CTCACACATG CCCACCGTGC
451 CCAGCACCTG AACTCCTGGG GGGACCGTCA GTCTTCCTCT TCCCCCCAAA
501 ACCCAAGGAC ACCCTCATGA TCTCCCGGAC CCCTGAGGTC ACATGCGTGG
551 TGGTGGACGT GAGCCACGAA GACCCTGAGG TCAAGTTCAA CTGGTACGTG
601 GACGGCGTGG AGGTGCATAA TGCCAAGACA AAGCCGCGGG AGGAGCAGTA
651 CAACAGCACG TACCGTGTGG TCAGCGTCCT CACCGTCCTG CACCAGGACT
701 GGCTGAATGG CAAGGAGTAC AAGTGCAAGG TCTCCAACAA AGCCCTCCCA
751 GCCCCCATCG AGAAAACCAT CTCCAAAGCC AAAGGGCAGC CCCGAGAACC
801 ACAGGTGTAC ACCCTGCCCC CATCCCGGGA GGAGATGACC AAGAACCAGG
851 TCAGCCTGAC CTGCCTGGTC AAAGGCTTCT ATCCCAGCGA CATCGCCGTG
901 GAGTGGGAGA GCAATGGGCA GCCGGAGAAC AACTACAAGA CCACGCCTCC
951 CGTGCTGGAC TCCGACGGCT CCTTCTTCCT CTATAGCAAG CTCACCGTGG
1001 ACAAGAGCAG GTGGCAGCAG GGGAACGTCT TCTCATGCTC CGTGATGCAT
1051 GAGGCTCTGC ACAACCACTA CACGCAGAAG AGCCTCTCCC TGTCTCCGGG
1101 TAAA (SEQ ID NO: 511)

[0933] A mature ActRIIB(G68R, L79E, F82Y, N83R)-G1Fc fusion polypeptide (SEQ ID NO: 512) is as follows and may optionally be provided with the lysine removed from the C-terminus. The G1Fc region may also comprise a mutation to an alanine at position 234 or a mutation to an alanine at position 235, or a combination thereof.

1 GRGEAETREC IYYNANWELE RTNQSGLERC EGEQDKRLHC YASWRNSSRT
51 IELVKKGCWE DDYRCYDRQE CVATEENPQV YFCCCEGNFC NERFTHLPEA
101 GGPEVTYEPP PTAPTGGGTH TCPPCPAPEL LGGPSVFLFP PKPKDTLMIS
151 RTPEVTCVVV DVSHEDPEVK FNWYVDGVEV HNAKTKPREE QYNSTYRVVS
201 VLTVLHQDWL NGKEYKCKVS NKALPAPIEK TISKAKGQPR EPQVYTLPPS
251 REEMTKNQVS LTCLVKGFYP SDIAVEWESN GQPENNYKTT PPVLDSDGSF
301 FLYSKLTVDK SRWQQGNVFS CSVMHEALHN HYTQKSLSLS PGK
(SEQ ID NO: 512)

[0934] The amino acid sequence of unprocessed ActRIIB(G68R, L79T, F82T, N83R)-G1Fc is shown below (SEQ ID NO: 513). The signal sequence and linker sequences are indicated by solid underline, and the G68R, L79T, F82T, N83R substitutions are indicated by double underline. The amino acid sequence of SEQ ID NO: 513 may optionally be provided with the lysine removed from the C-terminus. The G1Fc region may also comprise a mutation to an alanine at position 234 or a mutation to an alanine at position 235, or a combination thereof.

1 MDAMKRGLCC VLLLCGAVFV SPGASGRGEA ETRECIYYNA NWELERTNQS
51 GLERCEGEQD KRLHCYASWR NSSRTIELVK KGCWTDDTRC YDRQECVATE
101 ENPQVYFCCC EGNFCNERFT HLPEAGGPEV TYEPPPTAPT GGGTHTCPPC
151 PAPELLGGPS VFLFPPKPKD TLMISRTPEV TCVVVDVSHE DPEVKFNWYV
201 DGVEVHNAKT KPREEQYNST YRVVSVLTVL HQDWLNGKEY KCKVSNKALP
251 APIEKTISKA KGQPREPQVY TLPPSREEMT KNQVSLTCLV KGFYPSDIAV
301 EWESNGQPEN NYKTTPPVLD SDGSFFLYSK LTVDKSRWQQ GNVFSCSVMH
351 EALHNHYTQK SLSLSPGK (SEQ ID NO: 513)

[0935] This ActRIIB(G68R, L79T, F82T, N83R)-G1Fc fusion polypeptide is encoded by the following nucleic acid sequence (SEQ ID NO: 514):

1 ATGGATGCAA TGAAGAGAGG GCTCTGCTGT GTGCTGCTGC TGTGTGGAGC
51 AGTCTTCGTT TCGCCCGGCG CCTCTGGGCG TGGGGAGGCT GAGACACGGG
101 AGTGCATCTA CTACAACGCC AACTGGGAGC TGGAGCGCAC CAACCAGAGC
151 GGCCTGGAGC GCTGCGAAGG CGAGCAGGAC AAGCGGCTGC ACTGCTACGC
201 CTCCTGGCGC AACAGCTCTC GGACCATCGA GCTCGTGAAG AAGGGCTGCT
251 GGACCGATGA CACCCGGTGC TACGATAGGC AGGAGTGTGT GGCCACTGAG
301 GAGAACCCCC AGGTGTACTT CTGCTGCTGT GAAGGCAACT TCTGCAACGA
351 GCGCTTCACT CATTTGCCAG AGGCTGGGGG CCCGGAAGTC ACGTACGAGC
401 CACCCCCGAC AGCCCCCACC GGTGGTGGAA CTCACACATG CCCACCGTGC
451 CCAGCACCTG AACTCCTGGG GGGACCGTCA GTCTTCCTCT TCCCCCCAAA
501 ACCCAAGGAC ACCCTCATGA TCTCCCGGAC CCCTGAGGTC ACATGCGTGG
551 TGGTGGACGT GAGCCACGAA GACCCTGAGG TCAAGTTCAA CTGGTACGTG
601 GACGGCGTGG AGGTGCATAA TGCCAAGACA AAGCCGCGGG AGGAGCAGTA
651 CAACAGCACG TACCGTGTGG TCAGCGTCCT CACCGTCCTG CACCAGGACT
701 GGCTGAATGG CAAGGAGTAC AAGTGCAAGG TCTCCAACAA AGCCCTCCCA
751 GCCCCCATCG AGAAAACCAT CTCCAAAGCC AAAGGGCAGC CCCGAGAACC
801 ACAGGTGTAC ACCCTGCCCC CATCCCGGGA GGAGATGACC AAGAACCAGG
851 TCAGCCTGAC CTGCCTGGTC AAAGGCTTCT ATCCCAGCGA CATCGCCGTG
901 GAGTGGGAGA GCAATGGGCA GCCGGAGAAC AACTACAAGA CCACGCCTCC
951 CGTGCTGGAC TCCGACGGCT CCTTCTTCCT CTATAGCAAG CTCACCGTGG
1001 ACAAGAGCAG GTGGCAGCAG GGGAACGTCT TCTCATGCTC CGTGATGCAT
1051 GAGGCTCTGC ACAACCACTA CACGCAGAAG AGCCTCTCCC TGTCTCCGGG
1101 TAAA (SEQ ID NO: 514)

[0936] A mature ActRIIB(G68R, L79T, F82T, N83R)-G1Fc fusion polypeptide (SEQ ID NO: 515) is as follows and may optionally be provided with the lysine removed from the C-terminus. The G1Fc region may also comprise a mutation to an alanine at position 234 or a mutation to an alanine at position 235, or a combination thereof.

1 GRGEAETREC IYYNANWELE RTNQSGLERC EGEQDKRLHC YASWRNSSRT
51 IELVKKGCWT DDTRCYDRQE CVATEENPQV YFCCCEGNFC NERFTHLPEA
101 GGPEVTYEPP PTAPTGGGTH TCPPCPAPEL LGGPSVFLFP PKPKDTLMIS
151 RTPEVTCVVV DVSHEDPEVK FNWYVDGVEV HNAKTKPREE QYNSTYRVVS
201 VLTVLHQDWL NGKEYKCKVS NKALPAPIEK TISKAKGQPR EPQVYTLPPS
251 REEMTKNQVS LTCLVKGFYP SDIAVEWESN GQPENNYKTT PPVLDSDGSF
301 FLYSKLTVDK SRWQQGNVFS CSVMHEALHN HYTQKSLSLS PGK
(SEQ ID NO: 515)

### Example 13. Ligand Binding Profiles of Variant ActRIIB-Fc Homodimers and Activity of Variant ActRIIB-Fc Proteins in a Cell-Based Assay

[0937] To determine ligand binding profiles of variant ActRIIB-Fc homodimers, a Biacore™-based binding assay was used to compare ligand binding kinetics of certain variant ActRIIB-Fc proteins. ActRIIB-Fc proteins to be tested were independently captured onto the system using an anti-Fc antibody. Ligands were then injected and allowed to flow over the captured receptor protein. Results of variant ActRIIB-Fc proteins analyzed at 37° C. are shown in FIGS. 15A, 15B, 16A, and 16B.

[0938] To determine activity of variant ActRIIB-Fc proteins, an A204 cell-based assay was used to compare effects among variant ActRIIB-Fc proteins on signaling by activin A, activin B, GDF8, and GDF11, whereas a HepG2 cell-based assay was used for BMP6 and a T98G-cell based assay was used for BMP10, and BMP9. In brief, the A204 assay uses a human A204 rhabdomyosarcoma cell line (ATCC^{®}: HTB-82™) derived from muscle and the reporter vector pGL3(CAGA)12 (Dennler et al., 1998, EMBO 17: 3091-3100) as well as a Renilla reporter plasmid (pRLCMV) to control for transfection efficiency. The CAGA12 motif is present in TGF-β responsive genes (e.g., PAI-1 gene), so this vector is of general use for ligands that can signal through Smad2/3, including activin A, activin B, GDF8, and GDF11. The HepG2 assay uses a human hepatocellular carcinoma cell line (ATCC^{®}: HB-8065™) and the T98G assay uses a human T98G glioblastoma cell line (ATCC^{®} CRL-1690™). Both lines were used with the reporter vector pGL3 BRE-luciferase as wells as a Renilla reporter plasmid (pRLCMV) to control for transfection efficiency. The BMP-responsive element (BRE) was identified in the Idl gene (Korchynskyi, O. and ten Dijke, P., Journal of Biological Chemistry, 2002, 277:4883-4891) so this vector is of general use for ligands that can signal through Smad1/5/8, including BMP6, BMP10, and BMP9.

[0939] On day 1, A-204 cells were transferred into one or more 48-well plates. On day 2, each 48-well plate was transfected with pGL3(CAGA)12(10 µg) + pRLCMV (100 ng) and X-tremeGENE 9 (0.1% BSA containing medium). On day 3, ligands diluted in medium containing 0.1% BSA were preincubated with ActRIIB-Fc proteins for 30 min before addition to cells. Approximately six hours later, the cells were rinsed with PBS and lysed. Cell lysates were analyzed in a luciferase assay to determine the extent of Smad activation. The HepG2 and T98G assays were performed similarly only substituting pGL3-BRE for the reporter plasmid and X-tremeGENE HP for the transfection reagent and assaying the cells after an overnight incubation with ligand/test samples.

[0940] This assay was used to screen variant ActRIIB-Fc proteins for inhibitory effects on cell signaling by activin A, activin B, GDF8, GDF11, BMP6, BMP10, and BMP9 (FIG. 14). Potencies of homodimeric Fc fusion proteins incorporating amino acid substitutions in the human ActRIIB extracellular domain were compared with that of an Fc fusion protein comprising unmodified human ActRIIB extracellular domain.

[0941] As shown in FIG. 14-16B, substitutions in the ActRIIB extracellular domain can alter the balance between activin A, activin B, GDF8, GDF11, BMP6, BMP9, and BMP10 inhibition in both a Biacore™-based binding assay and a cell-based assay. Binding profiles differed significantly between sets of variants.

[0942] Variants ActRIIB(F82D, N83R)-G1Fc (e.g., SEQ ID NO: 437), and ActRIIB(E50L, F82D, N83R)-G1Fc (e.g., SEQ ID NO: 452), compared to an unmodified ActRIIB-Fc protein (e.g., “WT”), displayed a significant reduction in activin A binding, a significant reduction in GDF11 binding, no detected BMP10 binding, a minor reduction in BMP6 binding, and a significant reduction in BMP9 binding. Further, ActRIIB(F82D, N83R)-G1Fc (e.g., SEQ ID NO: 437), and ActRIIB(E50L, F82D, N83R)-G1Fc (e.g., SEQ ID NO: 452), compared to WT, displayed near-WT levels of activin B binding.

[0943] Variant ActRIIB(L79F, F82T)-G1Fc (e.g., SEQ ID NO: 434), compared to WT, displayed a significant reduction in activin A binding, near-WT levels of GDF11 binding, near-WT levels of BMP10 binding, a slight increase in BMP6 binding, and a modest reduction in BMP9 binding. Further, ActRIIB(L79F, F82T)-G1Fc (e.g., SEQ ID NO: 434), compared WT, displayed near-WT levels of activin B binding.

[0944] Variant ActRIIB(L79S)-G1Fc (e.g., SEQ ID NO: 392), compared to WT, displayed a significant reduction in activin A binding, near-WT levels of GDF11 binding, a minor reduction in BMP10 binding, near-WT levels of BMP6 binding, and a minor reduction in BMP9 binding. Further, ActRIIB(L79S)-G1Fc (e.g., SEQ ID NO: 392), compared to WT, displayed near-WT levels of activin B binding.

[0945] Variant ActRIIB(L57R, F82L, N83R)-G1Fc (e.g., SEQ ID NO: 488), compared to WT, displayed a modest reduction in activin A binding, a significant reduction in GDF11 binding, no detectable BMP10 binding, a minor reduction in BMP6 binding, and a significant reduction in BMP9 binding. Further, ActRIIB(L57R, F82L, N83R)-G1Fc (e.g., SEQ ID NO: 488), compared to WT, displayed near-WT levels of activin B binding.

[0946] Variant ActRIIB(L57V, F82D, N83R)-G1Fc (e.g., SEQ ID NO: 494), compared to WT, displayed a modest reduction in activin A binding, a significant reduction in GDF11 binding, no detectable BMP10 binding, a minor reduction in BMP6 binding, and a significant reduction in BMP9 binding. Further, ActRIIB(L57V, F82D, N83R)-G1Fc (e.g., SEQ ID NO: 494), compared to WT, displayed modestly reduced activin B binding.

[0947] Variants ActRIIB(L57R, F82D, N83R)-G1Fc (e.g., SEQ ID NO: 482), and ActRIIB(L57R, F82E, N83R)-G1Fc (e.g., SEQ ID NO: 485), compared to WT, displayed a modest reduction in activin A binding, a significant reduction in GDF11 binding, no detectable BMP10 binding, a significant reduction in BMP6 binding, and a significant reduction in BMP9 binding. Further, ActRIIB(L57R, F82D, N83R)-G1Fc (e.g., SEQ ID NO: 482), and ActRIIB(L57R, F82E, N83R)-G1Fc (e.g., SEQ ID NO: 485), compared to WT, displayed modestly reduced activin B binding.

[0948] Variants ActRIIB(F82S, N83R)-G1Fc (e.g., SEQ ID NO: 443), and ActRIIB(E52N, F82Y, N83R)-G1Fc (e.g., SEQ ID NO: 467), compared to WT, displayed a modest reduction in activin A binding, a significant reduction in GDF11 binding, no detectable BMP10 binding, a minor reduction in BMP6 binding, and a significant reduction in BMP9 binding. Further, ActRIIB(F82S, N83R)-G1Fc (e.g., SEQ ID NO: 443), and ActRIIB(E52N, F82Y, N83R)-G1Fc (e.g., SEQ ID NO: 467), compared to WT, displayed near-WT levels of activin B binding. , compared to an unmodified ActRIIB-Fc protein

[0949] Variant ActRIIB(L57T, F82Y, N83R)-G1Fc (e.g., SEQ ID NO: 491), compared to WT, displayed a modest reduction in activin A binding, a significant reduction in GDF11 binding, minimal BMP10 binding, a minor reduction in BMP6 binding, and a significant reduction in BMP9 binding. Further, ActRIIB(L57T, F82Y, N83R)-G1Fc (e.g., SEQ ID NO: 491), compared to WT, displayed near-WT levels of activin B binding.

[0950] Variant ActRIIB(E52D, F82D, N83R)-G1Fc (e.g., SEQ ID NO: 455), compared to WT, displayed a modest reduction in activin A binding, a significant reduction in GDF11 binding, minimal BMP10 binding, a minor reduction in BMP6 binding, and a significant reduction in BMP9 binding. Further, ActRIIB(E52D, F82D, N83R)-G1Fc (e.g., SEQ ID NO: 455), compared to WT, displayed a modest reduction in activin B binding.

[0951] Variant ActRIIB(L57I, F82D, N83R)-G1Fc (e.g., SEQ ID NO: 476), compared to WT, displayed a modest reduction in activin A binding, a significant reduction in GDF11 binding, minimal BMP10 binding, a modest reduction in BMP6 binding, and a significant reduction in BMP9 binding. Further, ActRIIB(L57I, F82D, N83R)-G1Fc (e.g., SEQ ID NO: 476), compared to WT, displayed a modest reduction in activin B binding.

[0952] Variant ActRIIB(E52D, F82T, N83R)-G1Fc (e.g., SEQ ID NO: 461), compared to WT, displayed a modest reduction in activin A binding, a significant reduction in GDF11 binding, a modest reduction in BMP10 binding, a minor reduction in BMP6 binding, and a significant reduction in BMP9 binding. Further, ActRIIB(E52D, F82T, N83R)-G1Fc (e.g., SEQ ID NO: 461), compared to WT, displayed near-WT levels of activin B binding.

[0953] Variant ActRIIB(E52N, F82I, N83R)-G1Fc (e.g., SEQ ID NO: 464), compared to WT, displayed a modest reduction in activin A binding, a significant reduction in GDF11 binding, a modest reduction in BMP10 binding, minimal BMP6 binding, and a significant reduction in BMP9 binding. Further, ActRIIB(E52N, F82I, N83R)-G1Fc (e.g., SEQ ID NO: 464), compared to WT, displayed near-WT levels of activin B binding.

[0954] Variant ActRIIB(E52Y, F82D, N83R)-G1Fc (e.g., SEQ ID NO: 470), compared to WT, displayed a modest reduction in activin A binding, a significant reduction in GDF11 binding, a modest reduction in BMP10 binding, minimal BMP6 binding, and a modest reduction in BMP9 binding. Further, ActRIIB(E52Y, F82D, N83R)-G1Fc (e.g., SEQ ID NO: 470), compared to WT, displayed a modest reduction in activin B binding.

[0955] Variants ActRIIB(F82E, N83R)-G1Fc (e.g., SEQ ID NO: 440), ActRIIB(E52D, F82E, N83R)-G1Fc (e.g., SEQ ID NO: 458), ActRIIB(L57I, F82E, N83R)-G1Fc (e.g., SEQ ID NO: 479), and ActRIIB(L57E, F82E, N83R)-G1Fc (e.g., SEQ ID NO: 473), compared to WT, displayed a modest reduction in activin A binding, a modest reduction in GDF11 binding, no detectable BMP10 binding, a minor reduction in BMP6 binding, and a significant reduction in BMP9 binding. Further, ActRIIB(F82E, N83R)-G1Fc (e.g., SEQ ID NO: 440), ActRIIB(E52D, F82E, N83R)-G1Fc (e.g., SEQ ID NO: 458), ActRIIB(L57I, F82E, N83R)-GlFc (e.g., SEQ ID NO: 479), and ActRIIB(L57E, F82E, N83R)-G1Fc (e.g., SEQ ID NO: 473), compared to WT, displayed a minor reduction in activin B binding.

[0956] Variant ActRIIB(L79W)-GlFc (e.g., SEQ ID NO: 395), compared to WT, displayed a modest reduction in activin A binding, near-WT levels of GDF11 binding, near-WT levels of BMP10 binding, a slight increase in BMP6 binding, and near-WT levels of BMP9 binding. Further, ActRIIB(L79W)-G1Fc (e.g., SEQ ID NO: 395), compared to WT, displayed near-WT levels of activin B binding.

[0957] Variant ActRIIB(L79F, F82D)-G1Fc (e.g., SEQ ID NO: 431), compared to WT, displayed a modest reduction in activin A binding, near-WT levels of GDF11 binding, near-WT levels of BMP10 binding, a slight increase in BMP6 binding, and near-WT levels of BMP9 binding. Further, ActRIIB(L79F, F82D)-G1Fc (e.g., SEQ ID NO: 431), compared to WT, displayed a modest reduction in activin B binding.

[0958] Variant ActRIIB(L57V, F82Y, N83R)-G1Fc (e.g., SEQ ID NO: 497), compared to WT, displayed a minor reduction in activin A binding, a modest reduction in GDF11 binding, a modest reduction in BMP10 binding, a significant reduction in BMP6 binding, and a significant reduction in BMP9 binding. Further, ActRIIB(L57V, F82Y, N83R)-G1Fc (e.g., SEQ ID NO: 497), compared to WT, displayed near-WT levels of activin B binding.

[0959] Variant ActRIIB(L57R, F82D)-G1Fc (e.g., SEQ ID NO: 422), compared to WT, displayed near-WT levels of activin A binding, near-WT levels of GDF11 binding, a modest reduction in BMP10 binding, a modest reduction in BMP6 binding, and a modest reduction in BMP9 binding. Further, ActRIIB(L57R, F82D)-G1Fc (e.g., SEQ ID NO: 422), compared to WT, displayed a minor reduction in activin B binding.

[0960] Variant ActRIIB(E94K)-G1Fc (e.g., SEQ ID NO: 413), compared to WT, displayed near-WT levels of activin A binding, near-WT levels of GDF11 binding, near-WT levels of BMP10 binding, a minimal binding to BMP6, and a minor reduction in BMP9 binding. Further, ActRIIB(E94K)-G1Fc (e.g., SEQ ID NO: 413), compared to WT, displayed near-WT levels of activin B binding.

[0961] Variants ActRIIB(F82D)-G1Fc (e.g., SEQ ID NO: 398), ActRIIB(F82E)-G1Fc (e.g., SEQ ID NO: 401), ActRIIB(F82S)-G1Fc (e.g., SEQ ID NO: 407), ActRIIB(F82L)-G1Fc (e.g., SEQ ID NO: 404), and ActRIIB(E52D, F82T)-G1Fc (e.g., SEQ ID NO: 419), compared to WT, displayed near-WT levels of activin A binding, near-WT levels of GDF11 binding, near-WT levels of BMP10 binding, near-ActRIIB levels of BMP6 binding, and a minor reduction in BMP9 binding. Further, ActRIIB(F82D)-G1Fc (e.g., SEQ ID NO: 398), ActRIIB(F82E)-G1Fc (e.g., SEQ ID NO: 401), ActRIIB(F82S)-G1Fc (e.g., SEQ ID NO: 407), ActRIIB(F82L)-G1Fc (e.g., SEQ ID NO: 404), and ActRIIB(E52D, F82T)-G1Fc (e.g., SEQ ID NO: 419), compared to WT, displayed near-WT levels of activin B binding.

[0962] Variants ActRIIB(E52N)-G1Fc (e.g., SEQ ID NO: 371) and ActRIIB(F82Y)-G1Fc (e.g., SEQ ID NO: 410), compared to WT, displayed near-WT levels of activin A binding, near-WT levels of GDF11 binding, near-WT levels of BMP10 binding, near-ActRIIB levels of BMP6 binding, and near-WT levels of BMP9 binding. Further, ActRIIB(E52N)-G1Fc (e.g., SEQ ID NO: 371), ActRIIB(F82Y)-GlFc (e.g., SEQ ID NO: 410), compared to WT, displayed near-WT levels of activin B binding.

[0963] Variant ActRIIB(E52D, F82D)-G1Fc (e.g., SEQ ID NO: 416), compared to WT, displayed near-WT levels of activin A binding, near-WT levels of GDF11 binding, near-WT levels of BMP10 binding, near-ActRIIB levels of BMP6 binding, and a modest reduction in BMP9 binding. Further, ActRIIB(E52D, F82D)-G1Fc (e.g., SEQ ID NO: 416), compared to WT, displayed a minor reduction in activin B binding.

[0964] Variant ActRIIB(L57R, F82T)-G1Fc (e.g., SEQ ID NO: 428), compared to WT, displayed near-WT levels of activin A binding, near-WT levels of GDF11 binding, a minor reduction in BMP10 binding, near-ActRIIB levels of BMP6 binding, and a modest reduction in BMP9 binding. Further, ActRIIB(L57R, F82T)-G1Fc (e.g., SEQ ID NO: 428), compared to WT, displayed a minor reduction in activin B binding.

[0965] Variant ActRIIB(L57R, F82S)-G1Fc (e.g., SEQ ID NO: 425), compared to WT, displayed near-WT levels of activin A binding, near-WT levels of GDF11 binding, a minor reduction in BMP10 binding, near-ActRIIB levels of BMP6 binding, and a modest reduction in BMP9 binding. Further, ActRIIB(L57R, F82S)-G1Fc (e.g., SEQ ID NO: 425), compared to WT, displayed near-WT levels of activin B binding.

[0966] Variant ActRIIB(F82I, E94K)-G1Fc (e.g., SEQ ID NO: 449), compared to WT, displayed near-WT levels of activin A binding, near-WT levels of GDF11 binding, near-WT levels of BMP10 binding, a minor reduction in BMP6 binding, and a modest reduction in BMP9 binding. Further, ActRIIB(F82I, E94K)-G1Fc (e.g., SEQ ID NO: 449), compared to WT, displayed a minor reduction in activin B binding.

[0967] These results indicate that variant ActRIIB-Fc proteins can display varying ligand binding profiles compared to an Fc fusion protein comprising unmodified ActRIIB extracellular domain. Accordingly, these variants may be more useful than ActRIIB-Fc in certain applications where such selective antagonism profiles are advantageous. Examples include therapeutic applications where it is desirable to retain antagonism of one or more of activin A, activin B, GDF8, GDF11, BMP6, and/or BMP10, while reducing antagonism of BMP9.

### INCORPORATION BY REFERENCE

[0968] All publications and patents mentioned herein are hereby incorporated by reference in their entirety as if each individual publication or patent was specifically and individually indicated to be incorporated by reference.

[0969] While specific embodiments of the subject matter have been discussed, the above specification is illustrative and not restrictive. Many variations will become apparent to those skilled in the art upon review of this specification and the claims below. The full scope of the invention should be determined by reference to the claims, along with their full scope of equivalents, and the specification, along with such variations.

ATGGCGGAGTCGGCCGGAGCCTCCTCCTTCTTCCCCCTTGTTGTCCTCCT
GCTCGCCGGCAGCGGCGGG TCCGGGCCCCGGGGGGTCCAGGCTCTGCTGT
GTGCGTGCACCAGCTGCCTCCAGGCCAACTACACGTGTGAGACAGATGGG
GCCTGCATGGTTTCCATTTTCAATCTGGATGGGATGGAGCACCATGTGCG
CACCTGCATCCCCAAAGTGGAGCTGGTCCCTGCCGGGAAGCCCTTCTACT
GCCTGAGCTCGGAGGACCTGCGCAACACCCACTGCTGCTACACTGACTAC
TGCAACAGGATCGACTTGAGGGTGCCCAGTGGTCACCTCAAGGAGCCTGA
GCACCCGTCCATGTGGGGCCCGGTGGAGCTGGTAGGCATCATCGCCGGCC
CGGTGTTCCTCCTGTTCCTCATCATCATCATTGTTTTCCTTGTCATTAAC
TATCATCAGCGTGTCTATCACAACCGCCAGAGACTGGACATGGAAGATCC
CTCATGTGAGATGTGTCTCTCCAAAGACAAGACGCTCCAGGATCTTGTCT
ACGATCTCTCCACCTCAGGGTCTGGCTCAGGGTTACCCCTCTTTGTCCAG
CGCACAGTGGCCCGAACCATCGTTTTACAAGAGATTATTGGCAAGGGTCG
GTTTGGGGAAGTATGGCGGGGCCGCTGGAGGGGTGGTGATGTGGCTGTGA
AAATATTCTCTTCTCGTGAAGAACGGTCTTGGTTCAGGGAAGCAGAGATA
TACCAGACGGTCATGCTGCGCCATGAAAACATCCTTGGATTTATTGCTGC
TGACAATAAAGATAATGGCACCTGGACACAGCTGTGGCTTGTTTCTGACT
ATCATGAGCACGGGTCCCTGTTTGATTATCTGAACCGGTACACAGTGACA
ATTGAGGGGATGATTAAGCTGGCCTTGTCTGCTGCTAGTGGGCTGGCACA
CCTGCACATGGAGATCGTGGGCACCCAAGGGAAGCCTGGAATTGCTCATC
GAGACTTAAAGTCAAAGAACATTCTGGTGAAGAAAAATGGCATGTGTGCC
ATAGCAGACCTGGGCCTGGCTGTCCGTCATGATGCAGTCACTGACACCAT
TGACATTGCCCCGAATCAGAGGGTGGGGACCAAACGATACATGGCCCCTG
AAGTACTTGATGAAACCATTAATATGAAACACTTTGACTCCTTTAAATGT
GCTGATATTTATGCCCTCGGGCTTGTATATTGGGAGATTGCTCGAAGATG
CAATTCTGGAGGAGTCCATGAAGAATATCAGCTGCCATATTACGACTTAG
TGCCCTCTGACCCTTCCATTGAGGAAATGCGAAAGGTTGTATGTGATCAG
AAGCTGCGTCCCAACATCCCCAACTGGTGGCAGAGTTATGAGGCACTGCG
GGTGATGGGGAAGATGATGCGAGAGTGTTGGTATGCCAACGGCGCAGCCC
GCCTGACGGCCCTGCGCATCAAGAAGACCCTCTCCCAGCTCAGCGTGCAG
GAAGACGTGAAGATC (SEQ ID NO: 221)

TCCGGGCCCCGGGGGGTCCAGGCTCTGCTGTGTGCGTGCACCAGCTGCCT
CCAGGCCAACTACACGTGTGAGACAGATGGGGCCTGCATGGTTTCCATTT
TCAATCTGGATGGGATGGAGCACCATGTGCGCACCTGCATCCCCAAAGTG
GAGCTGGTCCCTGCCGGGAAGCCCTTCTACTGCCTGAGCTCGGAGGACCT
GCGCAACACCCACTGCTGCTACACTGACTACTGCAACAGGATCGACTTGA
GGGTGCCCAGTGGTCACCTCAAGGAGCCTGAGCACCCGTCCATGTGGGGC
CCGGTGGAG (SEQ ID NO: 222)

ATGGCGGAGTCGGCCGGAGCCTCCTCCTTCTTCCCCCTTGTTGTCCTCCT
GCTCGCCGGCAGCGGCGGG TCCGGGCCCCGGGGGGTCCAGGCTCTGCTGT
GTGCGTGCACCAGCTGCCTCCAGGCCAACTACACGTGTGAGACAGATGGG
GCCTGCATGGTTTCCATTTTCAATCTGGATGGGATGGAGCACCATGTGCG
CACCTGCATCCCCAAAGTGGAGCTGGTCCCTGCCGGGAAGCCCTTCTACT
GCCTGAGCTCGGAGGACCTGCGCAACACCCACTGCTGCTACACTGACTAC
TGCAACAGGATCGACTTGAGGGTGCCCAGTGGTCACCTCAAGGAGCCTGA
GCACCCGTCCATGTGGGGCCCGGTGGAGCTGGTAGGCATCATCGCCGGCC
CGGTGTTCCTCCTGTTCCTCATCATCATCATTGTTTTCCTTGTCATTAAC
TATCATCAGCGTGTCTATCACAACCGCCAGAGACTGGACATGGAAGATCC
CTCATGTGAGATGTGTCTCTCCAAAGACAAGACGCTCCAGGATCTTGTCT
ACGATCTCTCCACCTCAGGGTCTGGCTCAGGGTTACCCCTCTTTGTCCAG
CGCACAGTGGCCCGAACCATCGTTTTACAAGAGATTATTGGCAAGGGTCG
GTTTGGGGAAGTATGGCGGGGCCGCTGGAGGGGTGGTGATGTGGCTGTGA
AAATATTCTCTTCTCGTGAAGAACGGTCTTGGTTCAGGGAAGCAGAGATA
TACCAGACGGTCATGCTGCGCCATGAAAACATCCTTGGATTTATTGCTGC
TGACAATAAAGCAGACTGCTCATTCCTCACATTGCCATGGGAAGTTGTAA
TGGTCTCTGCTGCCCCCAAGCTGAGGAGCCTTAGACTCCAATACAAGGGA
GGAAGGGGAAGAGCAAGATTTTTATTCCCACTGAATAATGGCACCTGGAC
ACAGCTGTGGCTTGTTTCTGACTATCATGAGCACGGGTCCCTGTTTGATT
ATCTGAACCGGTACACAGTGACAATTGAGGGGATGATTAAGCTGGCCTTG
TCTGCTGCTAGTGGGCTGGCACACCTGCACATGGAGATCGTGGGCACCCA
AGGGAAGCCTGGAATTGCTCATCGAGACTTAAAGTCAAAGAACATTCTGG
TGAAGAAAAATGGCATGTGTGCCATAGCAGACCTGGGCCTGGCTGTCCGT
CATGATGCAGTCACTGACACCATTGACATTGCCCCGAATCAGAGGGTGGG
GACCAAACGATACATGGCCCCTGAAGTACTTGATGAAACCATTAATATGA
AACACTTTGACTCCTTTAAATGTGCTGATATTTATGCCCTCGGGCTTGTA
TATTGGGAGATTGCTCGAAGATGCAATTCTGGAGGAGTCCATGAAGAATA
TCAGCTGCCATATTACGACTTAGTGCCCTCTGACCCTTCCATTGAGGAAA
TGCGAAAGGTTGTATGTGATCAGAAGCTGCGTCCCAACATCCCCAACTGG
TGGCAGAGTTATGAGGCACTGCGGGTGATGGGGAAGATGATGCGAGAGTG
TTGGTATGCCAACGGCGCAGCCCGCCTGACGGCCCTGCGCATCAAGAAGA
CCCTCTCCCAGCTCAGCGTGCAGGAAGACGTGAAGATC
(SEQ ID NO:223)

TCCGGGCCCCGGGGGGTCCAGGCTCTGCTGTGTGCGTGCACCAGCTGCCT
CCAGGCCAACTACACGTGTGAGACAGATGGGGCCTGCATGGTTTCCATTT
TCAATCTGGATGGGATGGAGCACCATGTGCGCACCTGCATCCCCAAAGTG
GAGCTGGTCCCTGCCGGGAAGCCCTTCTACTGCCTGAGCTCGGAGGACCT
GCGCAACACCCACTGCTGCTACACTGACTACTGCAACAGGATCGACTTGA
GGGTGCCCAGTGGTCACCTCAAGGAGCCTGAGCACCCGTCCATGTGGGGC
CCGGTGGAG
(SEQ ID NO: 224)

ATGACCCGGGCGCTCTGCTCAGCGCTCCGCCAGGCTCTCCTGCTGCTCGC
AGCGGCCGCC GAGCTCTCGCCAGGACTGAAGTGTGTATGTCTTTTGTGTG
ATTCTTCAAACTTTACCTGCCAAACAGAAGGAGCATGTTGGGCATCAGTC
ATGCTAACCAATGGAAAAGAGCAGGTGATCAAATCCTGTGTCTCCCTTCC
AGAACTGAATGCTCAAGTCTTCTGTCATAGTTCCAACAATGTTACCAAAA
CCGAATGCTGCTTCACAGATTTTTGCAACAACATAACACTGCACCTTCCA
ACAGCATCACCAAATGCCCCAAAACTTGGACCCATGGAGCTGGCCATCAT
TATTACTGTGCCTGTTTGCCTCCTGTCCATAGCTGCGATGCTGACAGTAT
GGGCATGCCAGGGTCGACAGTGCTCCTACAGGAAGAAAAAGAGACCAAAT
GTGGAGGAACCACTCTCTGAGTGCAATCTGGTAAATGCTGGAAAAACTCT
GAAAGATCTGATTTATGATGTGACCGCCTCTGGATCTGGCTCTGGTCTAC
CTCTGTTGGTTCAAAGGACAATTGCAAGGACGATTGTGCTTCAGGAAATA
GTAGGAAAAGGTAGATTTGGTGAGGTGTGGCATGGAAGATGGTGTGGGGA
AGATGTGGCTGTGAAAATATTCTCCTCCAGAGATGAAAGATCTTGGTTTC
GTGAGGCAGAAATTTACCAGACGGTCATGCTGCGACATGAAAACATCCTT
GGTTTCATTGCTGCTGACAACAAAGATAATGGAACTTGGACTCAACTTTG
GCTGGTATCTGAATATCATGAACAGGGCTCCTTATATGACTATTTGAATA
GAAATATAGTGACCGTGGCTGGAATGATCAAGCTGGCGCTCTCAATTGCT
AGTGGTCTGGCACACCTTCATATGGAGATTGTTGGTACACAAGGTAAACC
TGCTATTGCTCATCGAGACATAAAATCAAAGAATATCTTAGTGAAAAAGT
GTGAAACTTGTGCCATAGCGGACTTAGGGTTGGCTGTGAAGCATGATTCA
ATACTGAACACTATCGACATACCTCAGAATCCTAAAGTGGGAACCAAGAG
GTATATGGCTCCTGAAATGCTTGATGATACAATGAATGTGAATATCTTTG
AGTCCTTCAAACGAGCTGACATCTATTCTGTTGGTCTGGTTTACTGGGAA
ATAGCCCGGAGGTGTTCAGTCGGAGGAATTGTTGAGGAGTACCAATTGCC
TTATTATGACATGGTGCCTTCAGATCCCTCGATAGAGGAAATGAGAAAGG
TTGTTTGTGACCAGAAGTTTCGACCAAGTATCCCAAACCAGTGGCAAAGT
TGTGAAGCACTCCGAGTCATGGGGAGAATAATGCGTGAGTGTTGGTATGC
CAACGGAGCGGCCCGCCTAACTGCTCTTCGTATTAAGAAGACTATATCTC
AACTTTGTGTCAAAGAAGACTGCAAAGCC (SEQ ID NO: 233)

GAGCTCTCGCCAGGACTGAAGTGTGTATGTCTTTTGTGTGATTCTTCAAA
CTTTACCTGCCAAACAGAAGGAGCATGTTGGGCATCAGTCATGCTAACCA
ATGGAAAAGAGCAGGTGATCAAATCCTGTGTCTCCCTTCCAGAACTGAAT
GCTCAAGTCTTCTGTCATAGTTCCAACAATGTTACCAAAACCGAATGCTG
CTTCACAGATTTTTGCAACAACATAACACTGCACCTTCCAACAGCATCAC
CAAATGCCCCAAAACTTGGACCCATGGAG (SEQ ID NO: 234)

ATGCTAACCAATGGAAAAGAGCAGGTGATCAAATCCTGTGTCTCCCTTCC
AGAACTGAATGCTCAAGTCTTCTGTCATAGTTCCAACAATGTTACCAAAA
CCGAATGCTGCTTCACAGATTTTTGCAACAACATAACACTGCACCTTCCA
ACAGCATCACCAAATGCCCCAAAACTTGGACCCATGGAGCTGGCCATCAT
TATTACTGTGCCTGTTTGCCTCCTGTCCATAGCTGCGATGCTGACAGTAT
GGGCATGCCAGGGTCGACAGTGCTCCTACAGGAAGAAAAAGAGACCAAAT
GTGGAGGAACCACTCTCTGAGTGCAATCTGGTAAATGCTGGAAAAACTCT
GAAAGATCTGATTTATGATGTGACCGCCTCTGGATCTGGCTCTGGTCTAC
CTCTGTTGGTTCAAAGGACAATTGCAAGGACGATTGTGCTTCAGGAAATA
GTAGGAAAAGGTAGATTTGGTGAGGTGTGGCATGGAAGATGGTGTGGGGA
AGATGTGGCTGTGAAAATATTCTCCTCCAGAGATGAAAGATCTTGGTTTC
GTGAGGCAGAAATTTACCAGACGGTCATGCTGCGACATGAAAACATCCTT
GGTTTCATTGCTGCTGACAACAAAGATAATGGAACTTGGACTCAACTTTG
GCTGGTATCTGAATATCATGAACAGGGCTCCTTATATGACTATTTGAATA
GAAATATAGTGACCGTGGCTGGAATGATCAAGCTGGCGCTCTCAATTGCT
AGTGGTCTGGCACACCTTCATATGGAGATTGTTGGTACACAAGGTAAACC
TGCTATTGCTCATCGAGACATAAAATCAAAGAATATCTTAGTGAAAAAGT
GTGAAACTTGTGCCATAGCGGACTTAGGGTTGGCTGTGAAGCATGATTCA
ATACTGAACACTATCGACATACCTCAGAATCCTAAAGTGGGAACCAAGAG
GTATATGGCTCCTGAAATGCTTGATGATACAATGAATGTGAATATCTTTG
AGTCCTTCAAACGAGCTGACATCTATTCTGTTGGTCTGGTTTACTGGGAA
ATAGCCCGGAGGTGTTCAGTCGGAGGAATTGTTGAGGAGTACCAATTGCC
TTATTATGACATGGTGCCTTCAGATCCCTCGATAGAGGAAATGAGAAAGG
TTGTTTGTGACCAGAAGTTTCGACCAAGTATCCCAAACCAGTGGCAAAGT
TGTGAAGCACTCCGAGTCATGGGGAGAATAATGCGTGAGTGTTGGTATGC
CAACGGAGCGGCCCGCCTAACTGCTCTTCGTATTAAGAAGACTATATCTC
AACTTTGTGTCAAAGAAGACTGCAAAGCC (SEQ ID NO: 235)

ATGCTAACCAATGGAAAAGAGCAGGTGATCAAATCCTGTGTCTCCCTTCC
AGAACTGAATGCTCAAGTCTTCTGTCATAGTTCCAACAATGTTACCAAAA
CCGAATGCTGCTTCACAGATTTTTGCAACAACATAACACTGCACCTTCCA
ACAGCATCACCAAATGCCCCAAAACTTGGACCCATGGAG
(SEQ ID NO: 236)

ATGACCCGGGCGCTCTGCTCAGCGCTCCGCCAGGCTCTCCTGCTGCTCGC
AGCGGCCGCCGAGCTCTCGCCAGGACTGAAGTGTGTATGTCTTTTGTGTG
ATTCTTCAAACTTTACCTGCCAAACAGAAGGAGCATGTTGGGCATCAGTC
ATGCTAACCAATGGAAAAGAGCAGGTGATCAAATCCTGTGTCTCCCTTCC
AGAACTGAATGCTCAAGTCTTCTGTCATAGTTCCAACAATGTTACCAAAA
CCGAATGCTGCTTCACAGATTTTTGCAACAACATAACACTGCACCTTCCA
ACAGGTCTACCTCTGTTGGTTCAAAGGACAATTGCAAGGACGATTGTGCT
TCAGGAAATAGTAGGAAAAGGTAGATTTGGTGAGGTGTGGCATGGAAGAT
GGTGTGGGGAAGATGTGGCTGTGAAAATATTCTCCTCCAGAGATGAAAGA
TCTTGGTTTCGTGAGGCAGAAATTTACCAGACGGTCATGCTGCGACATGA
AAACATCCTTGGTTTCATTGCTGCTGACAACAAAGATAATGGAACTTGGA
CTCAACTTTGGCTGGTATCTGAATATCATGAACAGGGCTCCTTATATGAC
TATTTGAATAGAAATATAGTGACCGTGGCTGGAATGATCAAGCTGGCGCT
CTCAATTGCTAGTGGTCTGGCACACCTTCATATGGAGATTGTTGGTACAC
AAGGTAAACCTGCTATTGCTCATCGAGACATAAAATCAAAGAATATCTTA
GTGAAAAAGTGTGAAACTTGTGCCATAGCGGACTTAGGGTTGGCTGTGAA
GCATGATTCAATACTGAACACTATCGACATACCTCAGAATCCTAAAGTGG
GAACCAAGAGGTATATGGCTCCTGAAATGCTTGATGATACAATGAATGTG
AATATCTTTGAGTCCTTCAAACGAGCTGACATCTATTCTGTTGGTCTGGT
TTACTGGGAAATAGCCCGGAGGTGTTCAGTCGGAGGAATTGTTGAGGAGT
ACCAATTGCCTTATTATGACATGGTGCCTTCAGATCCCTCGATAGAGGAA
ATGAGAAAGGTTGTTTGTGACCAGAAGTTTCGACCAAGTATCCCAAACCA
GTGGCAAAGTTGTGAAGCACTCCGAGTCATGGGGAGAATAATGCGTGAGT
GTTGGTATGCCAACGGAGCGGCCCGCCTAACTGCTCTTCGTATTAAGAAG
ACTATATCTCAACTTTGTGTCAAAGAAGACTGCAAAGCC
(SEQ ID NO: 237)

GAGCTCTCGCCAGGACTGAAGTGTGTATGTCTTTTGTGTGATTCTTCAAA
CTTTACCTGCCAAACAGAAGGAGCATGTTGGGCATCAGTCATGCTAACCA
ATGGAAAAGAGCAGGTGATCAAATCCTGTGTCTCCCTTCCAGAACTGAAT
GCTCAAGTCTTCTGTCATAGTTCCAACAATGTTACCAAAACCGAATGCTG
CTTCACAGATTTTTGCAACAACATAACACTGCACCTTCCAACAGGTCTAC
CTCTGTTGGTTCAAAGGACAATTGCAAGGACGATTGTGCTTCAGGAAATA
GTAGGAAAAGGTAGATTTGGTGAGGTGTGGCATGGAAGATGGTGTGGGGA
AGATGTGGCTGTGAAAATATTCTCCTCCAGAGATGAAAGATCTTGGTTTC
GTGAGGCAGAAATTTACCAGACGGTCATGCTGCGACATGAAAACATCCTT
GGTTTCATTGCTGCTGACAACAAAGATAATGGAACTTGGACTCAACTTTG
GCTGGTATCTGAATATCATGAACAGGGCTCCTTATATGACTATTTGAATA
GAAATATAGTGACCGTGGCTGGAATGATCAAGCTGGCGCTCTCAATTGCT
AGTGGTCTGGCACACCTTCATATGGAGATTGTTGGTACACAAGGTAAACC
TGCTATTGCTCATCGAGACATAAAATCAAAGAATATCTTAGTGAAAAAGT
GTGAAACTTGTGCCATAGCGGACTTAGGGTTGGCTGTGAAGCATGATTCA
ATACTGAACACTATCGACATACCTCAGAATCCTAAAGTGGGAACCAAGAG
GTATATGGCTCCTGAAATGCTTGATGATACAATGAATGTGAATATCTTTG
AGTCCTTCAAACGAGCTGACATCTATTCTGTTGGTCTGGTTTACTGGGAA
ATAGCCCGGAGGTGTTCAGTCGGAGGAATTGTTGAGGAGTACCAATTGCC
TTATTATGACATGGTGCCTTCAGATCCCTCGATAGAGGAAATGAGAAAGG
TTGTTTGTGACCAGAAGTTTCGACCAAGTATCCCAAACCAGTGGCAAAGT
TGTGAAGCACTCCGAGTCATGGGGAGAATAATGCGTGAGTGTTGGTATGC
CAACGGAGCGGCCCGCCTAACTGCTCTTCGTATTAAGAAGACTATATCTC
AACTTTGTGTCAAAGAAGACTGCAAAGCC (SEQ ID NO:238)

ATGACCCGGGCGCTCTGCTCAGCGCTCCGCCAGGCTCTCCTGCTGCTCGC
AGCGGCCGCCGAGCTCTCGCCAGGACTGAAGTGTGTATGTCTTTTGTGTG
ATTCTTCAAACTTTACCTGCCAAACAGAAGGAGCATGTTGGGCATCAGTC
ATGCTAACCAATGGAAAAGAGCAGGTGATCAAATCCTGTGTCTCCCTTCC
AGAACTGAATGCTCAAGTCTTCTGTCATAGTTCCAACAATGTTACCAAAA
CCGAATGCTGCTTCACAGATTTTTGCAACAACATAACACTGCACCTTCCA
ACAGATAATGGAACTTGGACTCAACTTTGGCTGGTATCTGAATATCATGA
ACAGGGCTCCTTATATGACTATTTGAATAGAAATATAGTGACCGTGGCTG
GAATGATCAAGCTGGCGCTCTCAATTGCTAGTGGTCTGGCACACCTTCAT
ATGGAGATTGTTGGTACACAAGGTAAACCTGCTATTGCTCATCGAGACAT
AAAATCAAAGAATATCTTAGTGAAAAAGTGTGAAACTTGTGCCATAGCGG
ACTTAGGGTTGGCTGTGAAGCATGATTCAATACTGAACACTATCGACATA
CCTCAGAATCCTAAAGTGGGAACCAAGAGGTATATGGCTCCTGAAATGCT
TGATGATACAATGAATGTGAATATCTTTGAGTCCTTCAAACGAGCTGACA
TCTATTCTGTTGGTCTGGTTTACTGGGAAATAGCCCGGAGGTGTTCAGTC
GGAGGAATTGTTGAGGAGTACCAATTGCCTTATTATGACATGGTGCCTTC
AGATCCCTCGATAGAGGAAATGAGAAAGGTTGTTTGTGACCAGAAGTTTC
GACCAAGTATCCCAAACCAGTGGCAAAGTTGTGAAGCACTCCGAGTCATG
GGGAGAATAATGCGTGAGTGTTGGTATGCCAACGGAGCGGCCCGCCTAAC
TGCTCTTCGTATTAAGAAGACTATATCTCAACTTTGTGTCAAAGAAGACT
GCAAAGCCTAA (SEQ ID NO: 239)

GAGCTCTCGCCAGGACTGAAGTGTGTATGTCTTTTGTGTGATTCTTCAAA
CTTTACCTGCCAAACAGAAGGAGCATGTTGGGCATCAGTCATGCTAACCA
ATGGAAAAGAGCAGGTGATCAAATCCTGTGTCTCCCTTCCAGAACTGAAT
GCTCAAGTCTTCTGTCATAGTTCCAACAATGTTACCAAAACCGAATGCTG
CTTCACAGATTTTTGCAACAACATAACACTGCACCTTCCAACAGATAATG
GAACTTGGACTCAACTTTGGCTGGTATCTGAATATCATGAACAGGGCTCC
TTATATGACTATTTGAATAGAAATATAGTGACCGTGGCTGGAATGATCAA
GCTGGCGCTCTCAATTGCTAGTGGTCTGGCACACCTTCATATGGAGATTG
TTGGTACACAAGGTAAACCTGCTATTGCTCATCGAGACATAAAATCAAAG
AATATCTTAGTGAAAAAGTGTGAAACTTGTGCCATAGCGGACTTAGGGTT
GGCTGTGAAGCATGATTCAATACTGAACACTATCGACATACCTCAGAATC
CTAAAGTGGGAACCAAGAGGTATATGGCTCCTGAAATGCTTGATGATACA
ATGAATGTGAATATCTTTGAGTCCTTCAAACGAGCTGACATCTATTCTGT
TGGTCTGGTTTACTGGGAAATAGCCCGGAGGTGTTCAGTCGGAGGAATTG
TTGAGGAGTACCAATTGCCTTATTATGACATGGTGCCTTCAGATCCCTCG
ATAGAGGAAATGAGAAAGGTTGTTTGTGACCAGAAGTTTCGACCAAGTAT
CCCAAACCAGTGGCAAAGTTGTGAAGCACTCCGAGTCATGGGGAGAATAA
TGCGTGAGTGTTGGTATGCCAACGGAGCGGCCCGCCTAACTGCTCTTCGT
ATTAAGAAGACTATATCTCAACTTTGTGTCAAAGAAGACTGCAAAGCCTA
A (SEQ ID NO: 240)

1-488. (canceled)

489. A protein comprising a variant ActRIIB amino acid sequence that is at least 90% identical to an amino acid sequence that begins at any one of amino acids 20-29 of SEQ ID NO: 2 and ends at any one of amino acids 109-134 of SEQ ID NO: 2, wherein the variant ActRIIB amino acid sequence comprises one or more amino acid substitutions with respect to SEQ ID NO: 2 at a position selected from A24, S26, N35, E37, L38, R40, S44, L46, E50, E52, Q53, D54, K55, R56, L57, Y60, R64, N65, S67, G68, K74, W78, L79, D80, F82, N83, T93, E94, Q98, V99, E105, E106, F108, E111, R112, A119, G120, E123, P129, P130, and A132.

490. The protein of claim 489, wherein the variant ActRIIB amino acid sequence is at least 96% identical to amino acids 29-109 of SEQ ID NO: 2.

491. The protein of claim 489, wherein the variant ActRIIB amino acid sequence is at least 96% identical to amino acids 20-134 of SEQ ID NO: 2.

492. The protein of claim 489, wherein the variant ActRIIB amino acid sequence comprises one or more amino acid substitutions with respect to SEQ ID NO: 2 selected from A24N, S26T, N35E, E37A, E37D, L38N, R40A, R40K, S44T, L46V, L46I, L46F, L46A, E50K, E50P, E50L, E52A, E52D, E52G, E52H, E52K, E52N, E52P, E52R, E52S, E52T, E52Y, Q53R, Q53K, Q53N, Q53H, D54A, K55A, K55D, K55E, K55R, R56A, L57E, L57I, L57R, L57T, L57V, Y60D, Y60F, Y60K, Y60P, R64A, R64H, R64K, R64N, N65A, S67N, S67T, G68R, K74A, K74E, K74F, K74I, K74R, K74Y, W78A, W78Y, L79A, L79D, L79E, L79F, L79H, L79K, L79P, L79R, L79S, L79T, L79W, D80A, D80F, D80G, D80I, D80K, D80M, D80N, D80R, F82A, F82D, F82E, F82I, F82K, F82L, F82S, F82T, F82W, F82Y, N83A, N83R, T93D, T93E, T93G, T93H, T93K, T93P, T93R, T93S, T93Y, E94K, Q98D, Q98E, Q98K, Q98R, V99E, V99G, V99K, E105N, F108I, F108L, F108V, F108Y, E111D, E111H, E111K, 111N, E111Q, E111R, R112H, R112K, R112N, R112S, R112T, A119P, A119V, G120N, E123N, P129N, P129S, P130A, P130R, and A132N.

493. The protein of claim 489, wherein the variant ActRIIB amino acid sequence comprises F82K substitution with respect to SEQ ID NO: 2.

494. The protein of claim 489, wherein the protein is a fusion protein that further comprises an Fc polypeptide amino acid sequence that is at least 94% identical to any one of SEQ ID NO: 13 to 30.

495. The protein of claim 494, further comprising a linker amino acid sequence between the variant ActRIIB amino acid sequence and the Fc polypeptide amino acid sequence, wherein the linker amino acid sequence is GGG or the amino acid sequence of any one of SEQ ID NOs: 262-267.

496. The protein of claim 489, wherein the protein comprises an amino acid sequence that is at least 94% identical to the amino acid sequence of SEQ ID NO: 522.

497. The protein of claim 489, wherein the protein comprises an amino acid sequence that is at least 94% identical to the amino acid sequence of SEQ ID NO: 524.

498. The protein of claim 489, wherein the protein comprises an amino acid sequence that is at least 98% identical to the amino acid sequence of SEQ ID NO: 524.

499. The protein of claim 489, wherein the protein is a homodimer.

500. The protein of claim 489, wherein the protein is a heteromultimer.

501. The protein of claim 500, wherein the protein further comprises an ALK4 polypeptide or an ALK7 polypeptide.

502. The protein of claim 501, wherein the heteromultimer is a heterodimer.

503. A recombinant nucleic acid comprising a coding sequence for the protein of claim 489.

504. A vector comprising the nucleic acid of claim 503.

505. A method of increasing red blood cell levels or hemoglobin levels in a subject, comprising administering to the subject in need thereof the protein of claim 489.

506. A method of increasing muscle mass or muscle strength in a subject, comprising administering to the subject in need thereof the protein of claim 489.

507. A method of treating a disorder in a subject, comprising administering to the subject in need thereof the protein of claim 489, wherein the disorder is selected from anemia, MDS, thalassemia, myelofibrosis, Duchenne muscular dystrophy (DMD), Becker muscular dystrophy (BMD), Charcot-Marie-Tooth disease (CMT), facioscapulohumeral muscular dystrophy (FSH or FSHD), Amyotrophic Lateral Sclerosis (ALS), spinal muscular atrophy (SMA), pulmonary arterial hypertension, interstitial lung disease, Alport syndrome, focal segmental glomerulosclerosis, polycystic kidney disease, chronic kidney disease, osteoporosis, hyperparathyroidism, Cushing’s disease, thyrotoxicosis, chronic diarrheal state or malabsorption, renal tubular acidosis, anorexia nervosa, and fibrodysplasia ossificans progressiva (FOP).

508. The method of claim 507, further comprising administering to the subject losartan, irbesartan, olmesartan, candesartan, valsartan, fimasartan, azilsartan, salprisartan, telmisartan, benazepril, captopril, enalapril, lisinopril, perindopril, ramipril, trandolapril, zofenopril, beclomethasone, betamethasone, budesonide, cortisone, dexamethasone, hydrocortisone, methylprednisolone, prednisolone, methylprednisone, prednisone, triamcinolone, cyclosporine, tacrolimus, cyclophosphamide, chlorambucil, tofacitinib, sirolimus, everolimus, azathioprine, leflunomide, mycophenolate, abatacept, adalimumab, anakinra, basiliximab, certolizumab, daclizumab, etanercept, fresolimumab, golimumab, infliximab, ixekizumab, natalizumab, rituximab, secukinumab, tocilizumab, ustekinumab, vedolizumab, benazepril, valsartan, fluvastatin, pravastatin, bardoxolone methyl, Achtar gel, tolvaptan, abatacept in combination with sparsentan, aliskiren, allopurinol, ANG-3070, atorvastatin, bleselumab, bosutinib, CCX140-B, CXA-10, D6-25-hydroxyvitamin D3, dapagliflozin, dexamethasone in combination with MMF, emodin, FG-3019, FK506, FK-506 and MMF, FT-011, galactose, GC1008, GFB-887, isotretinoin, lademirsen, lanreotide, levamisole, lixivaptan, losmapimod, metformin, mizorbine, N-acetylmannosamine, octreotide, paricalcitol, PF-06730512, pioglitazone, propagermanium, propagermanium and irbesartan, rapamune, rapamycin, RE-021, sparsentan, RG012, rosiglitazone, saquinivir, SAR339375, somatostatin, spironolactone, tesevatinib (KD019), tetracosactin, tripterygium wilfordii (TW), valproic acid, VAR-200, venglustat (GZ402671), verinurad, voclosporin, VX-147, kidney dialysis, kidney transplant, mesenchymal stem cell therapy, bone marrow stem cells, lipoprotein removal, a Liposorber LA-15 device, plasmapheresis, plasma exchange, or a change in dietary sodium intake.

The application's sequence listing, which the Patent Office published only in electronic form, follows.

SEQUENCE LISTING (528 sequences)

SEQ ID NO: 1 - protein, 115 aa, Homo sapiens
GRGEAETRECIYYNANWELERTNQSGLERCEGEQDKRLHCYASWRNSSGTIELVKKGCWLDDFNCYDRQECVATEENPQVYFCCCEGNFCNERFTHLPEAGGPEVTYEPPPTAPT

SEQ ID NO: 2 - protein, 512 aa, Homo sapiens
MTAPWVALALLWGSLCAGSGRGEAETRECIYYNANWELERTNQSGLERCEGEQDKRLHCYASWRNSSGTIELVKKGCWLDDFNCYDRQECVATEENPQVYFCCCEGNFCNERFTHLPEAGGPEVTYEPPPTAPTLLTVLAYSLLPIGGLSLIVLLAFWMYRHRKPPYGHVDIHEDPGPPPPSPLVGLKPLQLLEIKARGRFGCVWKAQLMNDFVAVKIFPLQDKQSWQSEREIFSTPGMKHENLLQFIAAEKRGSNLEVELWLITAFHDKGSLTDYLKGNIITWNELCHVAETMSRGLSYLHEDVPWCRGEGHKPSIAHRDFKSKNVLLKSDLTAVLADFGLAVRFEPGKPPGDTHGQVGTRRYMAPEVLEGAINFQRDAFLRIDMYAMGLVLWELVSRCKAADGPVDEYMLPFEEEIGQHPSLEELQEVVVHKKMRPTIKDHWLKHPGLAQLCVTIEECWDHDAEARLSAGCVEERVSLIRRSVNGTTSDCLVSLVTSVTNVDLPPKESSI

SEQ ID NO: 3 - DNA, 345 bp, Homo sapiens
gggcgtggggaggctgagacacgggagtgcatctactacaacgccaactgggagctggagcgcaccaaccagagcggcctggagcgctgcgaaggcgagcaggacaagcggctgcactgctacgcctcctggcgcaacagctctggcaccatcgagctcgtgaagaagggctgctggctagatgacttcaactgctacgataggcaggagtgtgtggccactgaggagaacccccaggtgtacttctgctgctgtgaaggcaacttctgcaacgagcgcttcactcatttgccagaggctgggggcccggaagtcacgtacgagccacccccgacagcccccacc

SEQ ID NO: 4 - DNA, 1539 bp, Homo sapiens
atgacggcgccctgggtggccctcgccctcctctggggatcgctgtgcgccggctctgggcgtggggaggctgagacacgggagtgcatctactacaacgccaactgggagctggagcgcaccaaccagagcggcctggagcgctgcgaaggcgagcaggacaagcggctgcactgctacgcctcctggcgcaacagctctggcaccatcgagctcgtgaagaagggctgctggctagatgacttcaactgctacgataggcaggagtgtgtggccactgaggagaacccccaggtgtacttctgctgctgtgaaggcaacttctgcaacgaacgcttcactcatttgccagaggctgggggcccggaagtcacgtacgagccacccccgacagcccccaccctgctcacggtgctggcctactcactgctgcccatcgggggcctttccctcatcgtcctgctggccttttggatgtaccggcatcgcaagcccccctacggtcatgtggacatccatgaggaccctgggcctccaccaccatcccctctggtgggcctgaagccactgcagctgctggagatcaaggctcgggggcgctttggctgtgtctggaaggcccagctcatgaatgactttgtagctgtcaagatcttcccactccaggacaagcagtcgtggcagagtgaacgggagatcttcagcacacctggcatgaagcacgagaacctgctacagttcattgctgccgagaagcgaggctccaacctcgaagtagagctgtggctcatcacggccttccatgacaagggctccctcacggattacctcaaggggaacatcatcacatggaacgaactgtgtcatgtagcagagacgatgtcacgaggcctctcatacctgcatgaggatgtgccctggtgccgtggcgagggccacaagccgtctattgcccacagggactttaaaagtaagaatgtattgctgaagagcgacctcacagccgtgctggctgactttggcttggctgttcgatttgagccagggaaacctccaggggacacccacggacaggtaggcacgagacggtacatggctcctgaggtgctcgagggagccatcaacttccagagagatgccttcctgcgcattgacatgtatgccatggggttggtgctgtgggagcttgtgtctcgctgcaaggctgcagacggacccgtggatgagtacatgctgccctttgaggaagagattggccagcacccttcgttggaggagctgcaggaggtggtggtgcacaagaagatgaggcccaccattaaagatcactggttgaaacacccgggcctggcccagctttgtgtgaccatcgaggagtgctgggaccatgatgcagaggctcgcttgtccgcgggctgtgtggaggagcgggtgtccctgattcggaggtcggtcaacggcactacctcggactgtctcgtttccctggtgacctctgtcaccaatgtggacctgccccctaaagagtcaagcatctaa

SEQ ID NO: 5 - protein, 343 aa, Artificial Sequence
  Description of Artificial Sequence: Synthetic polypeptide
GRGEAETRECIYYNANWELERTNQSGLERCEGEQDKRLHCYASWRNSSGTIELVKKGCWLDDFNCYDRQECVATEENPQVYFCCCEGNFCNERFTHLPEAGGPEVTYEPPPTAPTGGGTHTCPPCPAPELLGGPSVFLFPPKPKDTLMISRTPEVTCVVVDVSHEDPEVKFNWYVDGVEVHNAKTKPREEQYNSTYRVVSVLTVLHQDWLNGKEYKCKVSNKALPAPIEKTISKAKGQPREPQVYTLPPSREEMTKNQVSLTCLVKGFYPSDIAVEWESNGQPENNYKTTPPVLDSDGSFFLYSKLTVDKSRWQQGNVFSCSVMHEALHNHYTQKSLSLSPGK

SEQ ID NO: 6 - protein, 368 aa, Artificial Sequence
  Description of Artificial Sequence: Synthetic polypeptide
MDAMKRGLCCVLLLCGAVFVSPGASGRGEAETRECIYYNANWELERTNQSGLERCEGEQDKRLHCYASWRNSSGTIELVKKGCWLDDFNCYDRQECVATEENPQVYFCCCEGNFCNERFTHLPEAGGPEVTYEPPPTAPTGGGTHTCPPCPAPELLGGPSVFLFPPKPKDTLMISRTPEVTCVVVDVSHEDPEVKFNWYVDGVEVHNAKTKPREEQYNSTYRVVSVLTVLHQDWLNGKEYKCKVSNKALPAPIEKTISKAKGQPREPQVYTLPPSREEMTKNQVSLTCLVKGFYPSDIAVEWESNGQPENNYKTTPPVLDSDGSFFLYSKLTVDKSRWQQGNVFSCSVMHEALHNHYTQKSLSLSPGK

SEQ ID NO: 7 - protein, 21 aa, Apis sp.
MKFLVNVALVFMVVYISYIYA

SEQ ID NO: 8 - protein, 22 aa, Unknown
  Description of Unknown: Tissue plasminogen activator peptide
MDAMKRGLCCVLLLCGAVFVSP

SEQ ID NO: 9 - protein, 18 aa, Unknown
  Description of Unknown: Native peptide
MTAPWVALALLWGSLCAG

SEQ ID NO: 10 - DNA, 1107 bp, Artificial Sequence
  Description of Artificial Sequence: Synthetic polynucleotide
atggatgcaatgaagagagggctctgctgtgtgctgctgctgtgtggagcagtcttcgtttcgcccggcgcctctgggcgtggggaggctgagacacgggagtgcatctactacaacgccaactgggagctggagcgcaccaaccagagcggcctggagcgctgcgaaggcgagcaggacaagcggctgcactgctacgcctcctggcgcaacagctctggcaccatcgagctcgtgaagaagggctgctggctagatgacttcaactgctacgataggcaggagtgtgtggccactgaggagaacccccaggtgtacttctgctgctgtgaaggcaacttctgcaacgagcgcttcactcatttgccagaggctgggggcccggaagtcacgtacgagccacccccgacagcccccaccggtggtggaactcacacatgcccaccgtgcccagcacctgaactcctggggggaccgtcagtcttcctcttccccccaaaacccaaggacaccctcatgatctcccggacccctgaggtcacatgcgtggtggtggacgtgagccacgaagaccctgaggtcaagttcaactggtacgtggacggcgtggaggtgcataatgccaagacaaagccgcgggaggagcagtacaacagcacgtaccgtgtggtcagcgtcctcaccgtcctgcaccaggactggctgaatggcaaggagtacaagtgcaaggtctccaacaaagccctcccagcccccatcgagaaaaccatctccaaagccaaagggcagccccgagaaccacaggtgtacaccctgcccccatcccgggaggagatgaccaagaaccaggtcagcctgacctgcctggtcaaaggcttctatcccagcgacatcgccgtggagtgggagagcaatgggcagccggagaacaactacaagaccacgcctcccgtgctggactccgacggctccttcttcctctatagcaagctcaccgtggacaagagcaggtggcagcaggggaacgtcttctcatgctccgtgatgcatgaggctctgcacaaccactacacgcagaagagcctctccctgtctccgggtaaatga

SEQ ID NO: 11 - protein, 6 aa, Artificial Sequence
  Description of Artificial Sequence: Synthetic peptide
GRGEAE

SEQ ID NO: 12 - protein, 335 aa, Artificial Sequence
  Description of Artificial Sequence: Synthetic polypeptide
ETRECIYYNANWELERTNQSGLERCEGEQDKRLHCYASWRNSSGTIELVKKGCWLDDFNCYDRQECVATEENPQVYFCCCEGNFCNERFTHLPEAGGPEVTYEPPPTGGGTHTCPPCPAPELLGGPSVFLFPPKPKDTLMISRTPEVTCVVVDVSHEDPEVKFNWYVDGVEVHNAKTKPREEQYNSTYRVVSVLTVLHQDWLNGKEYKCKVSNKALPAPIEKTISKAKGQPREPQVYTLPPSREEMTKNQVSLTCLVKGFYPSDIAVEWESNGQPENNYKTTPPVLDSDGSFFLYSKLTVDKSRWQQGNVFSCSVMHEALHNHYTQKSLSLSPGK

SEQ ID NO: 13 - protein, 225 aa, Homo sapiens
THTCPPCPAPELLGGPSVFLFPPKPKDTLMISRTPEVTCVVVDVSHEDPEVKFNWYVDGVEVHNAKTKPREEQYNSTYRVVSVLTVLHQDWLNGKEYKCKVSNKALPAPIEKTISKAKGQPREPQVYTLPPSREEMTKNQVSLTCLVKGFYPSDIAVEWESNGQPENNYKTTPPVLDSDGSFFLYSKLTVDKSRWQQGNVFSCSVMHEALHNHYTQKSLSLSPGK

SEQ ID NO: 14 - protein, 223 aa, Homo sapiens
VECPPCPAPPVAGPSVFLFPPKPKDTLMISRTPEVTCVVVDVSHEDPEVQFNWYVDGVEVHNAKTKPREEQFNSTFRVVSVLTVVHQDWLNGKEYKCKVSNKGLPAPIEKTISKTKGQPREPQVYTLPPSREEMTKNQVSLTCLVKGFYPSDIAVEWESNGQPENNYKTTPPMLDSDGSFFLYSKLTVDKSRWQQGNVFSCSVMHEALHNHYTQKSLSLSPGK

SEQ ID NO: 15 - protein, 232 aa, Homo sapiens
EPKSCDTPPPCPRCPAPELLGGPSVFLFPPKPKDTLMISRTPEVTCVVVDVSHEDPEVQFKWYVDGVEVHNAKTKPREEQYNSTFRVVSVLTVLHQDWLNGKEYKCKVSNKALPAPIEKTISKTKGQPREPQVYTLPPSREEMTKNQVSLTCLVKGFYPSDIAVEWESSGQPENNYNTTPPMLDSDGSFFLYSKLTVDKSRWQQGNIFSCSVMHEALHNRFTQKSLSLSPGK

SEQ ID NO: 16 - protein, 279 aa, Homo sapiens
ELKTPLGDTTHTCPRCPEPKSCDTPPPCPRCPEPKSCDTPPPCPRCPEPKSCDTPPPCPRCPAPELLGGPSVFLFPPKPKDTLMISRTPEVTCVVVDVSHEDPEVQFKWYVDGVEVHNAKTKPREEQYNSTFRVVSVLTVLHQDWLNGKEYKCKVSNKALPAPIEKTISKTKGQPREPQVYTLPPSREEMTKNQVSLTCLVKGFYPSDIAVEWESSGQPENNYNTTPPMLDSDGSFFLYSKLTVDKSRWQQGNIFSCSVMHEALHNRFTQKSLSLSPGK

SEQ ID NO: 17 - protein, 229 aa, Homo sapiens
ESKYGPPCPSCPAPEFLGGPSVFLFPPKPKDTLMISRTPEVTCVVVDVSQEDPEVQFNWYVDGVEVHNAKTKPREEQFNSTYRVVSVLTVLHQDWLNGKEYKCKVSNKGLPSSIEKTISKAKGQPREPQVYTLPPSQEEMTKNQVSLTCLVKGFYPSDIAVEWESNGQPENNYKTTPPVLDSDGSFFLYSRLTVDKSRWQEGNVFSCSVMHEALHNHYTQKSLSLSLGK

SEQ ID NO: 18 - protein, 225 aa, Artificial Sequence
  Description of Artificial Sequence: Synthetic polypeptide
THTCPPCPAPELLGGPSVFLFPPKPKDTLMISRTPEVTCVVVDVSHEDPEVKFNWYVDGVEVHNAKTKPREEQYNSTYRVVSVLTVLHQDWLNGKEYKCKVSNKALPAPIEKTISKAKGQPREPQVYTLPPSRKEMTKNQVSLTCLVKGFYPSDIAVEWESNGQPENNYKTTPPVLKSDGSFFLYSKLTVDKSRWQQGNVFSCSVMHEALHNHYTQKSLSLSPGK

SEQ ID NO: 19 - protein, 225 aa, Artificial Sequence
  Description of Artificial Sequence: Synthetic polypeptide
THTCPPCPAPELLGGPSVFLFPPKPKDTLMISRTPEVTCVVVDVSHEDPEVKFNWYVDGVEVHNAKTKPREEQYNSTYRVVSVLTVLHQDWLNGKEYKCKVSNKALPAPIEKTISKAKGQPREPQVYTLPPSREEMTKNQVSLTCLVKGFYPSDIAVEWESNGQPENNYDTTPPVLDSDGSFFLYSDLTVDKSRWQQGNVFSCSVMHEALHNHYTQKSLSLSPGK

SEQ ID NO: 20 - protein, 225 aa, Artificial Sequence
  Description of Artificial Sequence: Synthetic polypeptide
THTCPPCPAPELLGGPSVFLFPPKPKDTLMISRTPEVTCVVVDVSHEDPEVKFNWYVDGVEVHNAKTKPREEQYNSTYRVVSVLTVLHQDWLNGKEYKCKVSNKALPAPIEKTISKAKGQPREPQVYTLPPSREEMTKNQVSLYCLVKGFYPSDIAVEWESNGQPENNYKTTPPVLDSDGSFFLYSKLTVDKSRWQQGNVFSCSVMHEALHNHYTQKSLSLSPGK

SEQ ID NO: 21 - protein, 225 aa, Artificial Sequence
  Description of Artificial Sequence: Synthetic polypeptide
THTCPPCPAPELLGGPSVFLFPPKPKDTLMISRTPEVTCVVVDVSHEDPEVKFNWYVDGVEVHNAKTKPREEQYNSTYRVVSVLTVLHQDWLNGKEYKCKVSNKALPAPIEKTISKAKGQPREPQVYTLPPSREEMTKNQVSLTCLVKGFYPSDIAVEWESNGQPENNYKTTPPVLDSDGSFFLTSKLTVDKSRWQQGNVFSCSVMHEALHNHYTQKSLSLSPGK

SEQ ID NO: 22 - protein, 225 aa, Artificial Sequence
  Description of Artificial Sequence: Synthetic polypeptide
THTCPPCPAPELLGGPSVFLFPPKPKDTLMISRTPEVTCVVVDVSHEDPEVKFNWYVDGVEVHNAKTKPREEQYNSTYRVVSVLTVLHQDWLNGKEYKCKVSNKALPAPIEKTISKAKGQPREPQVYTLPPCREEMTKNQVSLWCLVKGFYPSDIAVEWESNGQPENNYKTTPPVLDSDGSFFLYSKLTVDKSRWQQGNVFSCSVMHEALHNHYTQKSLSLSPGK

SEQ ID NO: 23 - protein, 225 aa, Artificial Sequence
  Description of Artificial Sequence: Synthetic polypeptide
THTCPPCPAPELLGGPSVFLFPPKPKDTLMISRTPEVTCVVVDVSHEDPEVKFNWYVDGVEVHNAKTKPREEQYNSTYRVVSVLTVLHQDWLNGKEYKCKVSNKALPAPIEKTISKAKGQPREPQVCTLPPSREEMTKNQVSLSCAVKGFYPSDIAVEWESNGQPENNYKTTPPVLDSDGSFFLVSKLTVDKSRWQQGNVFSCSVMHEALHNHYTQKSLSLSPGK

SEQ ID NO: 24 - protein, 228 aa, Artificial Sequence
  Description of Artificial Sequence: Synthetic polypeptide
THTCPPCPAPELLGGPSVFLFPPKPKDTLMISRTPEVTCVVVDVSHEDPEVKFNWYVDGVEVHNAKTKPREEQYNSTYRVVSVLTVLHQDWLNGKEYKCKVSNKALPAPIEKTISKAKGQPFRPEVHLLPPSREEMTKNQVSLTCLARGFYPKDIAVEWESNGQPENNYKTTPSRQEPSQGTTTFAVTSKLTVDKSRWQQGNVFSCSVMHEALHNHYTQKTISLSPGK

SEQ ID NO: 25 - protein, 228 aa, Artificial Sequence
  Description of Artificial Sequence: Synthetic polypeptide
THTCPPCPAPELLGGPSVFLFPPKPKDTLMISRTPEVTCVVVDVSHEDPEVKFNWYVDGVEVHNAKTKPREEQYNSTYRVVSVLTVLHQDWLNGKEYKCKVSNKALPAPIEKTISKAKGQPREPQVYTLPPPSEELALNELVTLTCLVKGFYPSDIAVEWESNGQELPREKYLTWAPVLDSDGSFFLYSILRVAAEDWKKGDTFSCSVMHEALHNHYTQKSLDRSPGK

SEQ ID NO: 26 - protein, 261 aa, Artificial Sequence
  Description of Artificial Sequence: Synthetic polypeptide
THTCPPCPAPELLGGPSVFLFPPKPKDTLMISRTPEVTCVVVDVSHEDPEVKFNWYVDGVEVHNAKTKPREEQYNSTYRVVSVLTVLHQDWLNGKEYKCKVSNKALPAPIEKTISKAKGQPREPQVYTLPPSREEMTKNQVSLTCLVKGFYPSDIAVEWESNGQPENNYKTTPPVLDSDGSFFLYSKLTVDKSRWQQGNVFSCSVMHEALHNHYTQKSLSLSPGKGGSAQLEKELQALEKENAQLEWELQALEKELAQGAT

SEQ ID NO: 27 - protein, 261 aa, Artificial Sequence
  Description of Artificial Sequence: Synthetic polypeptide
THTCPPCPAPELLGGPSVFLFPPKPKDTLMISRTPEVTCVVVDVSHEDPEVKFNWYVDGVEVHNAKTKPREEQYNSTYRVVSVLTVLHQDWLNGKEYKCKVSNKALPAPIEKTISKAKGQPREPQVYTLPPSREEMTKNQVSLTCLVKGFYPSDIAVEWESNGQPENNYKTTPPVLDSDGSFFLYSKLTVDKSRWQQGNVFSCSVMHEALHNHYTQKSLSLSPGKGGSAQLKKKLQALKKKNAQLKWKLQALKKKLAQGAT

SEQ ID NO: 28 - protein, 225 aa, Artificial Sequence
  Description of Artificial Sequence: Synthetic polypeptide
THTCPPCPAPELLGGPSVFLFPPKPKDTLMISRTPEVTCVVVDVSHEDPEVKFNWYVDGVEVHNAKTKPREEQYNSTYRVVSVLTVLHQDWLNGKEYKCKVSNKALPAPIEKTISKAKGQPREPQVYTLPPCREEMTENQVSLWCLVKGFYPSDIAVEWESNGQPENNYKTTPPVLDSDGSFFLYSKLTVDKSRWQQGNVFSCSVMHEALHNHYTQDSLSLSPGK

SEQ ID NO: 29 - protein, 225 aa, Artificial Sequence
  Description of Artificial Sequence: Synthetic polypeptide
THTCPPCPAPELLGGPSVFLFPPKPKDTLMISRTPEVTCVVVDVSHEDPEVKFNWYVDGVEVHNAKTKPREEQYNSTYRVVSVLTVLHQDWLNGKEYKCKVSNKALPAPIEKTISKAKGQPREPQVCTLPPSREEMTKNQVSLSCAVKGFYPSDIAVEWESRGQPENNYKTTPPVLDSRGSFFLVSKLTVDKSRWQQGNVFSCSVMHEALHNHYTQKSLSLSPGK

SEQ ID NO: 30 - protein, 225 aa, Artificial Sequence
  Description of Artificial Sequence: Synthetic polypeptide
THTCPPCPAPELLGGPSVFLFPPKPKDTLMISRTPEVTCVVVDVSHEDPEVKFNWYVDGVEVHNAKTKPREEQYNSTYRVVSVLTVLHQDWLNGKEYKCKVSNKALPAPIEKTISKAKGQPREPQVYTLPPCREEMTKNQVSLWCLVKGFYPSDIAVEWESNGQPENNYKTTPPVLDSDGSFFLYSKLTVDKSRWQQGNVFSCSVMHEALHNRYTQKSLSLSPGK

SEQ ID NO: 31 - protein, 368 aa, Artificial Sequence
  Description of Artificial Sequence: Synthetic polypeptide
MDAMKRGLCCVLLLCGAVFVSPGASGRGEAETRECIYYNANWELERTNQSGLERCEGEQDARLHCYASWRNSSGTIELVKKGCWLDDFNCYDRQECVATEENPQVYFCCCEGNFCNERFTHLPEAGGPEVTYEPPPTAPTGGGTHTCPPCPAPELLGGPSVFLFPPKPKDTLMISRTPEVTCVVVDVSHEDPEVKFNWYVDGVEVHNAKTKPREEQYNSTYRVVSVLTVLHQDWLNGKEYKCKVSNKALPAPIEKTISKAKGQPREPQVYTLPPSREEMTKNQVSLTCLVKGFYPSDIAVEWESNGQPENNYKTTPPVLDSDGSFFLYSKLTVDKSRWQQGNVFSCSVMHEALHNHYTQKSLSLSPGK

SEQ ID NO: 32 - DNA, 1104 bp, Artificial Sequence
  Description of Artificial Sequence: Synthetic polynucleotide
atggatgcaatgaagagagggctctgctgtgtgctgctgctgtgtggagcagtcttcgtttcgcccggcgcctctgggcgtggggaggctgagacacgggagtgcatctactacaacgccaactgggagctggagcgcaccaaccagagcggcctggagcgctgcgaaggcgagcaggacgcccggctgcactgctacgcctcctggcgcaacagctctggcaccatcgagctcgtgaagaagggctgctggctagatgacttcaactgctacgataggcaggagtgtgtggccactgaggagaacccccaggtgtacttctgctgctgtgaaggcaacttctgcaacgagcgcttcactcatttgccagaggctgggggcccggaagtcacgtacgagccacccccgacagcccccaccggtggtggaactcacacatgcccaccgtgcccagcacctgaactcctggggggaccgtcagtcttcctcttccccccaaaacccaaggacaccctcatgatctcccggacccctgaggtcacatgcgtggtggtggacgtgagccacgaagaccctgaggtcaagttcaactggtacgtggacggcgtggaggtgcataatgccaagacaaagccgcgggaggagcagtacaacagcacgtaccgtgtggtcagcgtcctcaccgtcctgcaccaggactggctgaatggcaaggagtacaagtgcaaggtctccaacaaagccctcccagcccccatcgagaaaaccatctccaaagccaaagggcagccccgagaaccacaggtgtacaccctgcccccatcccgggaggagatgaccaagaaccaggtcagcctgacctgcctggtcaaaggcttctatcccagcgacatcgccgtggagtgggagagcaatgggcagccggagaacaactacaagaccacgcctcccgtgctggactccgacggctccttcttcctctatagcaagctcaccgtggacaagagcaggtggcagcaggggaacgtcttctcatgctccgtgatgcatgaggctctgcacaaccactacacgcagaagagcctctccctgtccccgggtaaa

SEQ ID NO: 33 - protein, 343 aa, Artificial Sequence
  Description of Artificial Sequence: Synthetic polypeptide
GRGEAETRECIYYNANWELERTNQSGLERCEGEQDARLHCYASWRNSSGTIELVKKGCWLDDFNCYDRQECVATEENPQVYFCCCEGNFCNERFTHLPEAGGPEVTYEPPPTAPTGGGTHTCPPCPAPELLGGPSVFLFPPKPKDTLMISRTPEVTCVVVDVSHEDPEVKFNWYVDGVEVHNAKTKPREEQYNSTYRVVSVLTVLHQDWLNGKEYKCKVSNKALPAPIEKTISKAKGQPREPQVYTLPPSREEMTKNQVSLTCLVKGFYPSDIAVEWESNGQPENNYKTTPPVLDSDGSFFLYSKLTVDKSRWQQGNVFSCSVMHEALHNHYTQKSLSLSPGK

SEQ ID NO: 34 - protein, 368 aa, Artificial Sequence
  Description of Artificial Sequence: Synthetic polypeptide
MDAMKRGLCCVLLLCGAVFVSPGASGRGEAETRECIYYNANWELERTNQSGLERCEGEQDERLHCYASWRNSSGTIELVKKGCWLDDFNCYDRQECVATEENPQVYFCCCEGNFCNERFTHLPEAGGPEVTYEPPPTAPTGGGTHTCPPCPAPELLGGPSVFLFPPKPKDTLMISRTPEVTCVVVDVSHEDPEVKFNWYVDGVEVHNAKTKPREEQYNSTYRVVSVLTVLHQDWLNGKEYKCKVSNKALPAPIEKTISKAKGQPREPQVYTLPPSREEMTKNQVSLTCLVKGFYPSDIAVEWESNGQPENNYKTTPPVLDSDGSFFLYSKLTVDKSRWQQGNVFSCSVMHEALHNHYTQKSLSLSPGK

SEQ ID NO: 35 - DNA, 1104 bp, Artificial Sequence
  Description of Artificial Sequence: Synthetic polynucleotide
atggatgcaatgaagagagggctctgctgtgtgctgctgctgtgtggagcagtcttcgtttcgcccggcgcctctgggcgtggggaggctgagacacgggagtgcatctactacaacgccaactgggagctggagcgcaccaaccagagcggcctggagcgctgcgaaggcgagcaggacgagcggctgcactgctacgcctcctggcgcaacagctctggcaccatcgagctcgtgaagaagggctgctggctagatgacttcaactgctacgataggcaggagtgtgtggccactgaggagaacccccaggtgtacttctgctgctgtgaaggcaacttctgcaacgagcgcttcactcatttgccagaggctgggggcccggaagtcacgtacgagccacccccgacagcccccaccggtggtggaactcacacatgcccaccgtgcccagcacctgaactcctggggggaccgtcagtcttcctcttccccccaaaacccaaggacaccctcatgatctcccggacccctgaggtcacatgcgtggtggtggacgtgagccacgaagaccctgaggtcaagttcaactggtacgtggacggcgtggaggtgcataatgccaagacaaagccgcgggaggagcagtacaacagcacgtaccgtgtggtcagcgtcctcaccgtcctgcaccaggactggctgaatggcaaggagtacaagtgcaaggtctccaacaaagccctcccagcccccatcgagaaaaccatctccaaagccaaagggcagccccgagaaccacaggtgtacaccctgcccccatcccgggaggagatgaccaagaaccaggtcagcctgacctgcctggtcaaaggcttctatcccagcgacatcgccgtggagtgggagagcaatgggcagccggagaacaactacaagaccacgcctcccgtgctggactccgacggctccttcttcctctatagcaagctcaccgtggacaagagcaggtggcagcaggggaacgtcttctcatgctccgtgatgcatgaggctctgcacaaccactacacgcagaagagcctctccctgtccccgggtaaa

SEQ ID NO: 36 - protein, 343 aa, Artificial Sequence
  Description of Artificial Sequence: Synthetic polypeptide
GRGEAETRECIYYNANWELERTNQSGLERCEGEQDERLHCYASWRNSSGTIELVKKGCWLDDFNCYDRQECVATEENPQVYFCCCEGNFCNERFTHLPEAGGPEVTYEPPPTAPTGGGTHTCPPCPAPELLGGPSVFLFPPKPKDTLMISRTPEVTCVVVDVSHEDPEVKFNWYVDGVEVHNAKTKPREEQYNSTYRVVSVLTVLHQDWLNGKEYKCKVSNKALPAPIEKTISKAKGQPREPQVYTLPPSREEMTKNQVSLTCLVKGFYPSDIAVEWESNGQPENNYKTTPPVLDSDGSFFLYSKLTVDKSRWQQGNVFSCSVMHEALHNHYTQKSLSLSPGK

SEQ ID NO: 37 - protein, 368 aa, Artificial Sequence
  Description of Artificial Sequence: Synthetic polypeptide
MDAMKRGLCCVLLLCGAVFVSPGASGRGEAETRECIYYNANWELERTNQSGLERCEGEQDKRLHCYASWRNSSGTIELVKKGCWLDDINCYDRQECVATEENPQVYFCCCEGNFCNERFTHLPEAGGPEVTYEPPPTAPTGGGTHTCPPCPAPELLGGPSVFLFPPKPKDTLMISRTPEVTCVVVDVSHEDPEVKFNWYVDGVEVHNAKTKPREEQYNSTYRVVSVLTVLHQDWLNGKEYKCKVSNKALPAPIEKTISKAKGQPREPQVYTLPPSREEMTKNQVSLTCLVKGFYPSDIAVEWESNGQPENNYKTTPPVLDSDGSFFLYSKLTVDKSRWQQGNVFSCSVMHEALHNHYTQKSLSLSPGK

SEQ ID NO: 38 - DNA, 1104 bp, Artificial Sequence
  Description of Artificial Sequence: Synthetic polynucleotide
atggatgcaatgaagagagggctctgctgtgtgctgctgctgtgtggagcagtcttcgtttcgcccggcgcctctgggcgtggggaggctgagacacgggagtgcatctactacaacgccaactgggagctggagcgcaccaaccagagcggcctggagcgctgcgaaggcgagcaggacaagcggctgcactgctacgcctcctggcgcaacagctctggcaccatcgagctcgtgaagaagggctgctggctagatgacatcaactgctacgataggcaggagtgtgtggccactgaggagaacccccaggtgtacttctgctgctgtgaaggcaacttctgcaacgagcgcttcactcatttgccagaggctgggggcccggaagtcacgtacgagccacccccgacagcccccaccggtggtggaactcacacatgcccaccgtgcccagcacctgaactcctggggggaccgtcagtcttcctcttccccccaaaacccaaggacaccctcatgatctcccggacccctgaggtcacatgcgtggtggtggacgtgagccacgaagaccctgaggtcaagttcaactggtacgtggacggcgtggaggtgcataatgccaagacaaagccgcgggaggagcagtacaacagcacgtaccgtgtggtcagcgtcctcaccgtcctgcaccaggactggctgaatggcaaggagtacaagtgcaaggtctccaacaaagccctcccagcccccatcgagaaaaccatctccaaagccaaagggcagccccgagaaccacaggtgtacaccctgcccccatcccgggaggagatgaccaagaaccaggtcagcctgacctgcctggtcaaaggcttctatcccagcgacatcgccgtggagtgggagagcaatgggcagccggagaacaactacaagaccacgcctcccgtgctggactccgacggctccttcttcctctatagcaagctcaccgtggacaagagcaggtggcagcaggggaacgtcttctcatgctccgtgatgcatgaggctctgcacaaccactacacgcagaagagcctctccctgtctccgggtaaa

SEQ ID NO: 39 - protein, 343 aa, Artificial Sequence
  Description of Artificial Sequence: Synthetic polypeptide
GRGEAETRECIYYNANWELERTNQSGLERCEGEQDKRLHCYASWRNSSGTIELVKKGCWLDDINCYDRQECVATEENPQVYFCCCEGNFCNERFTHLPEAGGPEVTYEPPPTAPTGGGTHTCPPCPAPELLGGPSVFLFPPKPKDTLMISRTPEVTCVVVDVSHEDPEVKFNWYVDGVEVHNAKTKPREEQYNSTYRVVSVLTVLHQDWLNGKEYKCKVSNKALPAPIEKTISKAKGQPREPQVYTLPPSREEMTKNQVSLTCLVKGFYPSDIAVEWESNGQPENNYKTTPPVLDSDGSFFLYSKLTVDKSRWQQGNVFSCSVMHEALHNHYTQKSLSLSPGK

SEQ ID NO: 40 - protein, 368 aa, Artificial Sequence
  Description of Artificial Sequence: Synthetic polypeptide
MDAMKRGLCCVLLLCGAVFVSPGASGRGEAETRECIYYNANWELERTNQSGLERCEGEQDKRLHCYASWRNSSGTIELVKKGCWLDDKNCYDRQECVATEENPQVYFCCCEGNFCNERFTHLPEAGGPEVTYEPPPTAPTGGGTHTCPPCPAPELLGGPSVFLFPPKPKDTLMISRTPEVTCVVVDVSHEDPEVKFNWYVDGVEVHNAKTKPREEQYNSTYRVVSVLTVLHQDWLNGKEYKCKVSNKALPAPIEKTISKAKGQPREPQVYTLPPSREEMTKNQVSLTCLVKGFYPSDIAVEWESNGQPENNYKTTPPVLDSDGSFFLYSKLTVDKSRWQQGNVFSCSVMHEALHNHYTQKSLSLSPGK

SEQ ID NO: 41 - DNA, 1104 bp, Artificial Sequence
  Description of Artificial Sequence: Synthetic polynucleotide
atggatgcaatgaagagagggctctgctgtgtgctgctgctgtgtggagcagtcttcgtttcgcccggcgcctctgggcgtggggaggctgagacacgggagtgcatctactacaacgccaactgggagctggagcgcaccaaccagagcggcctggagcgctgcgaaggcgagcaggacaagcggctgcactgctacgcctcctggcgcaacagctctggcaccatcgagctcgtgaagaagggctgctggctagatgacaagaactgctacgataggcaggagtgtgtggccactgaggagaacccccaggtgtacttctgctgctgtgaaggcaacttctgcaacgagcgcttcactcatttgccagaggctgggggcccggaagtcacgtacgagccacccccgacagcccccaccggtggtggaactcacacatgcccaccgtgcccagcacctgaactcctggggggaccgtcagtcttcctcttccccccaaaacccaaggacaccctcatgatctcccggacccctgaggtcacatgcgtggtggtggacgtgagccacgaagaccctgaggtcaagttcaactggtacgtggacggcgtggaggtgcataatgccaagacaaagccgcgggaggagcagtacaacagcacgtaccgtgtggtcagcgtcctcaccgtcctgcaccaggactggctgaatggcaaggagtacaagtgcaaggtctccaacaaagccctcccagcccccatcgagaaaaccatctccaaagccaaagggcagccccgagaaccacaggtgtacaccctgcccccatcccgggaggagatgaccaagaaccaggtcagcctgacctgcctggtcaaaggcttctatcccagcgacatcgccgtggagtgggagagcaatgggcagccggagaacaactacaagaccacgcctcccgtgctggactccgacggctccttcttcctctatagcaagctcaccgtggacaagagcaggtggcagcaggggaacgtcttctcatgctccgtgatgcatgaggctctgcacaaccactacacgcagaagagcctctccctgtctccgggtaaa

SEQ ID NO: 42 - protein, 343 aa, Artificial Sequence
  Description of Artificial Sequence: Synthetic polypeptide
GRGEAETRECIYYNANWELERTNQSGLERCEGEQDKRLHCYASWRNSSGTIELVKKGCWLDDKNCYDRQECVATEENPQVYFCCCEGNFCNERFTHLPEAGGPEVTYEPPPTAPTGGGTHTCPPCPAPELLGGPSVFLFPPKPKDTLMISRTPEVTCVVVDVSHEDPEVKFNWYVDGVEVHNAKTKPREEQYNSTYRVVSVLTVLHQDWLNGKEYKCKVSNKALPAPIEKTISKAKGQPREPQVYTLPPSREEMTKNQVSLTCLVKGFYPSDIAVEWESNGQPENNYKTTPPVLDSDGSFFLYSKLTVDKSRWQQGNVFSCSVMHEALHNHYTQKSLSLSPGK

SEQ ID NO: 43 - protein, 367 aa, Artificial Sequence
  Description of Artificial Sequence: Synthetic polypeptide
MDAMKRGLCCVLLLCGAVFVSPGASGRGEAETRECIYYNANWELERTNQSGLERCEGEQDKRLHCYASWRNSSGTIELVKKGCWEDDFNCYDRQECVATEENPQVYFCCCEGNFCNERFTHLPEAGGPEVTYEPPPTAPTGGGTHTCPPCPAPELLGGPSVFLFPPKPKDTLMISRTPEVTCVVVDVSHEDPEVKFNWYVDGVEVHNAKTKPREEQYNSTYRVVSVLTVLHQDWLNGKEYKCKVSNKALPAPIEKTISKAKGQPREPQVYTLPPSREEMTKNQVSLTCLVKGFYPSDIAVEWESNGQPENNYDTTPPVLDSDGSFFLYSDLTVDKSRWQQGNVFSCSVMHEALHNHYTQKSLSLSPG

SEQ ID NO: 44 - DNA, 1101 bp, Artificial Sequence
  Description of Artificial Sequence: Synthetic polynucleotide
atggatgcaatgaagagagggctctgctgtgtgctgctgctgtgtggagcagtcttcgtttcgcccggcgcctctgggcgtggggaggctgagacacgggagtgcatctactacaacgccaactgggagctggagcgcaccaaccagagcggcctggagcgctgcgaaggcgagcaggacaagcggctgcactgctacgcctcctggcgcaacagctctggcaccatcgagctcgtgaagaagggctgctgggaagatgacttcaactgctacgataggcaggagtgtgtggccactgaggagaacccccaggtgtacttctgctgctgtgaaggcaacttctgcaacgagcgcttcactcatttgccagaggctgggggcccggaagtcacgtacgagccacccccgacagcccccaccggtggtggaactcacacatgcccaccgtgcccagcacctgaactcctggggggaccgtcagtcttcctcttccccccaaaacccaaggacaccctcatgatctcccggacccctgaggtcacatgcgtggtggtggacgtgagccacgaagaccctgaggtcaagttcaactggtacgtggacggcgtggaggtgcataatgccaagacaaagccgcgggaggagcagtacaacagcacgtaccgtgtggtcagcgtcctcaccgtcctgcaccaggactggctgaatggcaaggagtacaagtgcaaggtctccaacaaagccctcccagcccccatcgagaaaaccatctccaaagccaaagggcagccccgagaaccacaggtgtacaccctgcccccatcccgggaggagatgaccaagaaccaggtcagcctgacctgcctggtcaaaggcttctatcccagcgacatcgccgtggagtgggagagcaatgggcagccggagaacaactacgacaccacgcctcccgtgctggactccgacggctccttcttcctctatagcgacctcaccgtggacaagagcaggtggcagcaggggaacgtcttctcatgctccgtgatgcatgaggctctgcacaaccactacacgcagaagagcctctccctgtctccgggt

SEQ ID NO: 45 - protein, 342 aa, Artificial Sequence
  Description of Artificial Sequence: Synthetic polypeptide
GRGEAETRECIYYNANWELERTNQSGLERCEGEQDKRLHCYASWRNSSGTIELVKKGCWEDDFNCYDRQECVATEENPQVYFCCCEGNFCNERFTHLPEAGGPEVTYEPPPTAPTGGGTHTCPPCPAPELLGGPSVFLFPPKPKDTLMISRTPEVTCVVVDVSHEDPEVKFNWYVDGVEVHNAKTKPREEQYNSTYRVVSVLTVLHQDWLNGKEYKCKVSNKALPAPIEKTISKAKGQPREPQVYTLPPSREEMTKNQVSLTCLVKGFYPSDIAVEWESNGQPENNYDTTPPVLDSDGSFFLYSDLTVDKSRWQQGNVFSCSVMHEALHNHYTQKSLSLSPG

SEQ ID NO: 46 - protein, 368 aa, Artificial Sequence
  Description of Artificial Sequence: Synthetic polypeptide
MDAMKRGLCCVLLLCGAVFVSPGASGRGEAETRECIYYNANWELERTNQSGLERCEGEQDKRLHCYASWRNSSGTIELVKKGCWLDDFNCYDRQECVATEENPQVYFCCCEGNFCNERFTHLPEAGGPEVTYEPPPTAPTGGGTHTCPPCPAPELLGGPSVFLFPPKPKDTLMISRTPEVTCVVVDVSHEDPEVKFNWYVDGVEVHNAKTKPREEQYNSTYRVVSVLTVLHQDWLNGKEYKCKVSNKALPAPIEKTISKAKGQPREPQVYTLPPSRKEMTKNQVSLTCLVKGFYPSDIAVEWESNGQPENNYKTTPPVLKSDGSFFLYSKLTVDKSRWQQGNVFSCSVMHEALHNHYTQKSLSLSPGK

SEQ ID NO: 47 - DNA, 1104 bp, Artificial Sequence
  Description of Artificial Sequence: Synthetic polynucleotide
atggatgcaatgaagagagggctctgctgtgtgctgctgctgtgtggagcagtcttcgtttcgcccggcgcctctgggcgtggggaggctgagacacgggagtgcatctactacaacgccaactgggagctggagcgcaccaaccagagcggcctggagcgctgcgaaggcgagcaggacaagcggctgcactgctacgcctcctggcgcaacagctctggcaccatcgagctcgtgaagaagggctgctggctagatgacttcaactgctacgataggcaggagtgtgtggccactgaggagaacccccaggtgtacttctgctgctgtgaaggcaacttctgcaacgagcgcttcactcatttgccagaggctgggggcccggaagtcacgtacgagccacccccgacagcccccaccggtggtggaactcacacatgcccaccgtgcccagcacctgaactcctggggggaccgtcagtcttcctcttccccccaaaacccaaggacaccctcatgatctcccggacccctgaggtcacatgcgtggtggtggacgtgagccacgaagaccctgaggtcaagttcaactggtacgtggacggcgtggaggtgcataatgccaagacaaagccgcgggaggagcagtacaacagcacgtaccgtgtggtcagcgtcctcaccgtcctgcaccaggactggctgaatggcaaggagtacaagtgcaaggtctccaacaaagccctcccagcccccatcgagaaaaccatctccaaagccaaagggcagccccgagaaccacaggtgtacaccctgcccccatcccggaaggagatgaccaagaaccaggtcagcctgacctgcctggtcaaaggcttctatcccagcgacatcgccgtggagtgggagagcaatgggcagccggagaacaactacaagaccacgcctcccgtgctgaagtccgacggctccttcttcctctatagcaagctcaccgtggacaagagcaggtggcagcaggggaacgtcttctcatgctccgtgatgcatgaggctctgcacaaccactacacgcagaagagcctctccctgtctccgggtaaa

SEQ ID NO: 48 - protein, 343 aa, Artificial Sequence
  Description of Artificial Sequence: Synthetic polypeptide
GRGEAETRECIYYNANWELERTNQSGLERCEGEQDKRLHCYASWRNSSGTIELVKKGCWLDDFNCYDRQECVATEENPQVYFCCCEGNFCNERFTHLPEAGGPEVTYEPPPTAPTGGGTHTCPPCPAPELLGGPSVFLFPPKPKDTLMISRTPEVTCVVVDVSHEDPEVKFNWYVDGVEVHNAKTKPREEQYNSTYRVVSVLTVLHQDWLNGKEYKCKVSNKALPAPIEKTISKAKGQPREPQVYTLPPSRKEMTKNQVSLTCLVKGFYPSDIAVEWESNGQPENNYKTTPPVLKSDGSFFLYSKLTVDKSRWQQGNVFSCSVMHEALHNHYTQKSLSLSPGK

SEQ ID NO: 49 - protein, 367 aa, Artificial Sequence
  Description of Artificial Sequence: Synthetic polypeptide
MDAMKRGLCCVLLLCGAVFVSPGASGRGEAETRECIYYNANWELERTNQSGLERCEGEQDKRLHCYASWRNSSGTIELVKKGCWEDDFNCYDRQECVATEENPQVYFCCCEGNFCNERFTHLPEAGGPEVTYEPPPTAPTGGGTHTCPPCPAPELLGGPSVFLFPPKPKDTLMISRTPEVTCVVVDVSHEDPEVKFNWYVDGVEVHNAKTKPREEQYNSTYRVVSVLTVLHQDWLNGKEYKCKVSNKALPAPIEKTISKAKGQPREPQVYTLPPCREEMTKNQVSLWCLVKGFYPSDIAVEWESNGQPENNYKTTPPVLDSDGSFFLYSKLTVDKSRWQQGNVFSCSVMHEALHNHYTQKSLSLSPG

SEQ ID NO: 50 - protein, 342 aa, Artificial Sequence
  Description of Artificial Sequence: Synthetic polypeptide
GRGEAETRECIYYNANWELERTNQSGLERCEGEQDKRLHCYASWRNSSGTIELVKKGCWEDDFNCYDRQECVATEENPQVYFCCCEGNFCNERFTHLPEAGGPEVTYEPPPTAPTGGGTHTCPPCPAPELLGGPSVFLFPPKPKDTLMISRTPEVTCVVVDVSHEDPEVKFNWYVDGVEVHNAKTKPREEQYNSTYRVVSVLTVLHQDWLNGKEYKCKVSNKALPAPIEKTISKAKGQPREPQVYTLPPCREEMTKNQVSLWCLVKGFYPSDIAVEWESNGQPENNYKTTPPVLDSDGSFFLYSKLTVDKSRWQQGNVFSCSVMHEALHNHYTQKSLSLSPG

SEQ ID NO: 51 - protein, 368 aa, Artificial Sequence
  Description of Artificial Sequence: Synthetic polypeptide
MDAMKRGLCCVLLLCGAVFVSPGASGRGEAETRECIYYNANWELERTNQSGLERCEGEQDKRLHCYASWRNSSGTIELVKKGCWLDDFNCYDRQECVATEENPQVYFCCCEGNFCNERFTHLPEAGGPEVTYEPPPTAPTGGGTHTCPPCPAPELLGGPSVFLFPPKPKDTLMISRTPEVTCVVVDVSHEDPEVKFNWYVDGVEVHNAKTKPREEQYNSTYRVVSVLTVLHQDWLNGKEYKCKVSNKALPAPIEKTISKAKGQPREPQVCTLPPSREEMTKNQVSLSCAVKGFYPSDIAVEWESNGQPENNYKTTPPVLDSDGSFFLVSKLTVDKSRWQQGNVFSCSVMHEALHNHYTQKSLSLSPGK

SEQ ID NO: 52 - protein, 343 aa, Artificial Sequence
  Description of Artificial Sequence: Synthetic polypeptide
GRGEAETRECIYYNANWELERTNQSGLERCEGEQDKRLHCYASWRNSSGTIELVKKGCWLDDFNCYDRQECVATEENPQVYFCCCEGNFCNERFTHLPEAGGPEVTYEPPPTAPTGGGTHTCPPCPAPELLGGPSVFLFPPKPKDTLMISRTPEVTCVVVDVSHEDPEVKFNWYVDGVEVHNAKTKPREEQYNSTYRVVSVLTVLHQDWLNGKEYKCKVSNKALPAPIEKTISKAKGQPREPQVCTLPPSREEMTKNQVSLSCAVKGFYPSDIAVEWESNGQPENNYKTTPPVLDSDGSFFLVSKLTVDKSRWQQGNVFSCSVMHEALHNHYTQKSLSLSPGK

SEQ ID NO: 53 - protein, 107 aa, Artificial Sequence
  Description of Artificial Sequence: Synthetic polypeptide
ETRECIYYNANWELERTNQSGLERCEGEQDKRLHCYASWRNSSGTIELVKKGCWLDDFNCYDRQECVATEENPQVYFCCCEGNFCNERFTHLPEAGGPEVTYEPPPT

SEQ ID NO: 54 - protein, 329 aa, Artificial Sequence
  Description of Artificial Sequence: Synthetic polypeptide
SGRGEAETRECIYYNANWELERTNQSGLERCEGEQDKRLHCYASWANSSGTIELVKKGCWLDDFNCYDRQECVATEENPQVYFCCCEGNFCNERFTHLPEAGGGTHTCPPCPAPELLGGPSVFLFPPKPKDTLMISRTPEVTCVVVDVSHEDPEVKFNWYVDGVEVHNAKTKPREEQYNSTYRVVSVLTVLHQDWLNGKEYKCKVSNKALPVPIEKTISKAKGQPREPQVYTLPPSREEMTKNQVSLTCLVKGFYPSDIAVEWESNGQPENNYKTTPPVLDSDGSFFLYSKLTVDKSRWQQGNVFSCSVMHEALHNHYTQKSLSLSPGK

SEQ ID NO: 55 - protein, 344 aa, Artificial Sequence
  Description of Artificial Sequence: Synthetic polypeptide
SGRGEAETRECIYYNANWELERTNQSGLERCEGEQDKRLHCYASWANSSGTIELVKKGCWLDDFNCYDRQECVATEENPQVYFCCCEGNFCNERFTHLPEAGGPEVTYEPPPTAPTGGGTHTCPPCPAPELLGGPSVFLFPPKPKDTLMISRTPEVTCVVVDVSHEDPEVKFNWYVDGVEVHNAKTKPREEQYNSTYRVVSVLTVLHQDWLNGKEYKCKVSNKALPVPIEKTISKAKGQPREPQVYTLPPSREEMTKNQVSLTCLVKGFYPSDIAVEWESNGQPENNYKTTPPVLDSDGSFFLYSKLTVDKSRWQQGNVFSCSVMHEALHNHYTQKSLSLSPGK

SEQ ID NO: 56-83 - skipped (28 entries)

SEQ ID NO: 84 - protein, 505 aa, Homo sapiens
MAESAGASSFFPLVVLLLAGSGGSGPRGVQALLCACTSCLQANYTCETDGACMVSIFNLDGMEHHVRTCIPKVELVPAGKPFYCLSSEDLRNTHCCYTDYCNRIDLRVPSGHLKEPEHPSMWGPVELVGIIAGPVFLLFLIIIIVFLVINYHQRVYHNRQRLDMEDPSCEMCLSKDKTLQDLVYDLSTSGSGSGLPLFVQRTVARTIVLQEIIGKGRFGEVWRGRWRGGDVAVKIFSSREERSWFREAEIYQTVMLRHENILGFIAADNKDNGTWTQLWLVSDYHEHGSLFDYLNRYTVTIEGMIKLALSAASGLAHLHMEIVGTQGKPGIAHRDLKSKNILVKKNGMCAIADLGLAVRHDAVTDTIDIAPNQRVGTKRYMAPEVLDETINMKHFDSFKCADIYALGLVYWEIARRCNSGGVHEEYQLPYYDLVPSDPSIEEMRKVVCDQKLRPNIPNWWQSYEALRVMGKMMRECWYANGAARLTALRIKKTLSQLSVQEDVKI

SEQ ID NO: 85 - protein, 546 aa, Homo sapiens
MAESAGASSFFPLVVLLLAGSGGSGPRGVQALLCACTSCLQANYTCETDGACMVSIFNLDGMEHHVRTCIPKVELVPAGKPFYCLSSEDLRNTHCCYTDYCNRIDLRVPSGHLKEPEHPSMWGPVELVGIIAGPVFLLFLIIIIVFLVINYHQRVYHNRQRLDMEDPSCEMCLSKDKTLQDLVYDLSTSGSGSGLPLFVQRTVARTIVLQEIIGKGRFGEVWRGRWRGGDVAVKIFSSREERSWFREAEIYQTVMLRHENILGFIAADNKADCSFLTLPWEVVMVSAAPKLRSLRLQYKGGRGRARFLFPLNNGTWTQLWLVSDYHEHGSLFDYLNRYTVTIEGMIKLALSAASGLAHLHMEIVGTQGKPGIAHRDLKSKNILVKKNGMCAIADLGLAVRHDAVTDTIDIAPNQRVGTKRYMAPEVLDETINMKHFDSFKCADIYALGLVYWEIARRCNSGGVHEEYQLPYYDLVPSDPSIEEMRKVVCDQKLRPNIPNWWQSYEALRVMGKMMRECWYANGAARLTALRIKKTLSQLSVQEDVKI

SEQ ID NO: 86 - protein, 103 aa, Homo sapiens
SGPRGVQALLCACTSCLQANYTCETDGACMVSIFNLDGMEHHVRTCIPKVELVPAGKPFYCLSSEDLRNTHCCYTDYCNRIDLRVPSGHLKEPEHPSMWGPVE

SEQ ID NO: 87 - protein, 103 aa, Homo sapiens; identical to SEQ ID NO: 86

SEQ ID NO: 88 - protein, 355 aa, Artificial Sequence
  Description of Artificial Sequence: Synthetic polypeptide
MDAMKRGLCCVLLLCGAVFVSPGASGPRGVQALLCACTSCLQANYTCETDGACMVSIFNLDGMEHHVRTCIPKVELVPAGKPFYCLSSEDLRNTHCCYTDYCNRIDLRVPSGHLKEPEHPSMWGPVETGGGTHTCPPCPAPELLGGPSVFLFPPKPKDTLMISRTPEVTCVVVDVSHEDPEVKFNWYVDGVEVHNAKTKPREEQYNSTYRVVSVLTVLHQDWLNGKEYKCKVSNKALPAPIEKTISKAKGQPREPQVYTLPPSREEMTKNQVSLTCLVKGFYPSDIAVEWESNGQPENNYDTTPPVLDSDGSFFLYSDLTVDKSRWQQGNVFSCSVMHEALHNHYTQKSLSLSPG

SEQ ID NO: 89 - protein, 331 aa, Artificial Sequence
  Description of Artificial Sequence: Synthetic polypeptide
SGPRGVQALLCACTSCLQANYTCETDGACMVSIFNLDGMEHHVRTCIPKVELVPAGKPFYCLSSEDLRNTHCCYTDYCNRIDLRVPSGHLKEPEHPSMWGPVETGGGTHTCPPCPAPELLGGPSVFLFPPKPKDTLMISRTPEVTCVVVDVSHEDPEVKFNWYVDGVEVHNAKTKPREEQYNSTYRVVSVLTVLHQDWLNGKEYKCKVSNKALPAPIEKTISKAKGQPREPQVYTLPPSREEMTKNQVSLTCLVKGFYPSDIAVEWESNGQPENNYDTTPPVLDSDGSFFLYSDLTVDKSRWQQGNVFSCSVMHEALHNHYTQKSLSLSPG

SEQ ID NO: 90-91 - skipped (2 entries)

SEQ ID NO: 92 - protein, 356 aa, Artificial Sequence
  Description of Artificial Sequence: Synthetic polypeptide
MDAMKRGLCCVLLLCGAVFVSPGASGPRGVQALLCACTSCLQANYTCETDGACMVSIFNLDGMEHHVRTCIPKVELVPAGKPFYCLSSEDLRNTHCCYTDYCNRIDLRVPSGHLKEPEHPSMWGPVETGGGTHTCPPCPAPELLGGPSVFLFPPKPKDTLMISRTPEVTCVVVDVSHEDPEVKFNWYVDGVEVHNAKTKPREEQYNSTYRVVSVLTVLHQDWLNGKEYKCKVSNKALPAPIEKTISKAKGQPREPQVCTLPPSREEMTKNQVSLSCAVKGFYPSDIAVEWESNGQPENNYKTTPPVLDSDGSFFLVSKLTVDKSRWQQGNVFSCSVMHEALHNHYTQKSLSLSPGK

SEQ ID NO: 93 - protein, 332 aa, Artificial Sequence
  Description of Artificial Sequence: Synthetic polypeptide
SGPRGVQALLCACTSCLQANYTCETDGACMVSIFNLDGMEHHVRTCIPKVELVPAGKPFYCLSSEDLRNTHCCYTDYCNRIDLRVPSGHLKEPEHPSMWGPVETGGGTHTCPPCPAPELLGGPSVFLFPPKPKDTLMISRTPEVTCVVVDVSHEDPEVKFNWYVDGVEVHNAKTKPREEQYNSTYRVVSVLTVLHQDWLNGKEYKCKVSNKALPAPIEKTISKAKGQPREPQVCTLPPSREEMTKNQVSLSCAVKGFYPSDIAVEWESNGQPENNYKTTPPVLDSDGSFFLVSKLTVDKSRWQQGNVFSCSVMHEALHNHYTQKSLSLSPGK

SEQ ID NO: 94-119 - skipped (26 entries)

SEQ ID NO: 120 - protein, 493 aa, Homo sapiens
MTRALCSALRQALLLLAAAAELSPGLKCVCLLCDSSNFTCQTEGACWASVMLTNGKEQVIKSCVSLPELNAQVFCHSSNNVTKTECCFTDFCNNITLHLPTASPNAPKLGPMELAIIITVPVCLLSIAAMLTVWACQGRQCSYRKKKRPNVEEPLSECNLVNAGKTLKDLIYDVTASGSGSGLPLLVQRTIARTIVLQEIVGKGRFGEVWHGRWCGEDVAVKIFSSRDERSWFREAEIYQTVMLRHENILGFIAADNKDNGTWTQLWLVSEYHEQGSLYDYLNRNIVTVAGMIKLALSIASGLAHLHMEIVGTQGKPAIAHRDIKSKNILVKKCETCAIADLGLAVKHDSILNTIDIPQNPKVGTKRYMAPEMLDDTMNVNIFESFKRADIYSVGLVYWEIARRCSVGGIVEEYQLPYYDMVPSDPSIEEMRKVVCDQKFRPSIPNQWQSCEALRVMGRIMRECWYANGAARLTALRIKKTISQLCVKEDCKA

SEQ ID NO: 121 - protein, 413 aa, Homo sapiens
MTRALCSALRQALLLLAAAAELSPGLKCVCLLCDSSNFTCQTEGACWASVMLTNGKEQVIKSCVSLPELNAQVFCHSSNNVTKTECCFTDFCNNITLHLPTGLPLLVQRTIARTIVLQEIVGKGRFGEVWHGRWCGEDVAVKIFSSRDERSWFREAEIYQTVMLRHENILGFIAADNKDNGTWTQLWLVSEYHEQGSLYDYLNRNIVTVAGMIKLALSIASGLAHLHMEIVGTQGKPAIAHRDIKSKNILVKKCETCAIADLGLAVKHDSILNTIDIPQNPKVGTKRYMAPEMLDDTMNVNIFESFKRADIYSVGLVYWEIARRCSVGGIVEEYQLPYYDMVPSDPSIEEMRKVVCDQKFRPSIPNQWQSCEALRVMGRIMRECWYANGAARLTALRIKKTISQLCVKEDCKA

SEQ ID NO: 122 - protein, 336 aa, Homo sapiens
MTRALCSALRQALLLLAAAAELSPGLKCVCLLCDSSNFTCQTEGACWASVMLTNGKEQVIKSCVSLPELNAQVFCHSSNNVTKTECCFTDFCNNITLHLPTDNGTWTQLWLVSEYHEQGSLYDYLNRNIVTVAGMIKLALSIASGLAHLHMEIVGTQGKPAIAHRDIKSKNILVKKCETCAIADLGLAVKHDSILNTIDIPQNPKVGTKRYMAPEMLDDTMNVNIFESFKRADIYSVGLVYWEIARRCSVGGIVEEYQLPYYDMVPSDPSIEEMRKVVCDQKFRPSIPNQWQSCEALRVMGRIMRECWYANGAARLTALRIKKTISQLCVKEDCKA

SEQ ID NO: 123 - protein, 93 aa, Homo sapiens
ELSPGLKCVCLLCDSSNFTCQTEGACWASVMLTNGKEQVIKSCVSLPELNAQVFCHSSNNVTKTECCFTDFCNNITLHLPTASPNAPKLGPME

SEQ ID NO: 124 - protein, 443 aa, Homo sapiens
MLTNGKEQVIKSCVSLPELNAQVFCHSSNNVTKTECCFTDFCNNITLHLPTASPNAPKLGPMELAIIITVPVCLLSIAAMLTVWACQGRQCSYRKKKRPNVEEPLSECNLVNAGKTLKDLIYDVTASGSGSGLPLLVQRTIARTIVLQEIVGKGRFGEVWHGRWCGEDVAVKIFSSRDERSWFREAEIYQTVMLRHENILGFIAADNKDNGTWTQLWLVSEYHEQGSLYDYLNRNIVTVAGMIKLALSIASGLAHLHMEIVGTQGKPAIAHRDIKSKNILVKKCETCAIADLGLAVKHDSILNTIDIPQNPKVGTKRYMAPEMLDDTMNVNIFESFKRADIYSVGLVYWEIARRCSVGGIVEEYQLPYYDMVPSDPSIEEMRKVVCDQKFRPSIPNQWQSCEALRVMGRIMRECWYANGAARLTALRIKKTISQLCVKEDCKA

SEQ ID NO: 125 - protein, 63 aa, Homo sapiens
MLTNGKEQVIKSCVSLPELNAQVFCHSSNNVTKTECCFTDFCNNITLHLPTASPNAPKLGPME

SEQ ID NO: 126 - protein, 393 aa, Artificial Sequence
  Description of Artificial Sequence: Synthetic polypeptide
ELSPGLKCVCLLCDSSNFTCQTEGACWASVMLTNGKEQVIKSCVSLPELNAQVFCHSSNNVTKTECCFTDFCNNITLHLPTGLPLLVQRTIARTIVLQEIVGKGRFGEVWHGRWCGEDVAVKIFSSRDERSWFREAEIYQTVMLRHENILGFIAADNKDNGTWTQLWLVSEYHEQGSLYDYLNRNIVTVAGMIKLALSIASGLAHLHMEIVGTQGKPAIAHRDIKSKNILVKKCETCAIADLGLAVKHDSILNTIDIPQNPKVGTKRYMAPEMLDDTMNVNIFESFKRADIYSVGLVYWEIARRCSVGGIVEEYQLPYYDMVPSDPSIEEMRKVVCDQKFRPSIPNQWQSCEALRVMGRIMRECWYANGAARLTALRIKKTISQLCVKEDCKA

SEQ ID NO: 127 - protein, 316 aa, Artificial Sequence
  Description of Artificial Sequence: Synthetic polypeptide
ELSPGLKCVCLLCDSSNFTCQTEGACWASVMLTNGKEQVIKSCVSLPELNAQVFCHSSNNVTKTECCFTDFCNNITLHLPTDNGTWTQLWLVSEYHEQGSLYDYLNRNIVTVAGMIKLALSIASGLAHLHMEIVGTQGKPAIAHRDIKSKNILVKKCETCAIADLGLAVKHDSILNTIDIPQNPKVGTKRYMAPEMLDDTMNVNIFESFKRADIYSVGLVYWEIARRCSVGGIVEEYQLPYYDMVPSDPSIEEMRKVVCDQKFRPSIPNQWQSCEALRVMGRIMRECWYANGAARLTALRIKKTISQLCVKEDCKA

SEQ ID NO: 128 - protein, 88 aa, Homo sapiens
LKCVCLLCDSSNFTCQTEGACWASVMLTNGKEQVIKSCVSLPELNAQVFCHSSNNVTKTECCFTDFCNNITLHLPTASPNAPKLGPME

SEQ ID NO: 129 - protein, 341 aa, Artificial Sequence
  Description of Artificial Sequence: Synthetic polypeptide
MDAMKRGLCCVLLLCGAVFVSPGAGLKCVCLLCDSSNFTCQTEGACWASVMLTNGKEQVIKSCVSLPELNAQVFCHSSNNVTKTECCFTDFCNNITLHLPTASPNAPKLGPMETGGGTHTCPPCPAPELLGGPSVFLFPPKPKDTLMISRTPEVTCVVVDVSHEDPEVKFNWYVDGVEVHNAKTKPREEQYNSTYRVVSVLTVLHQDWLNGKEYKCKVSNKALPAPIEKTISKAKGQPREPQVYTLPPSREEMTKNQVSLTCLVKGFYPSDIAVEWESNGQPENNYDTTPPVLDSDGSFFLYSDLTVDKSRWQQGNVFSCSVMHEALHNHYTQKSLSLSPG

SEQ ID NO: 130 - protein, 317 aa, Artificial Sequence
  Description of Artificial Sequence: Synthetic polypeptide
GLKCVCLLCDSSNFTCQTEGACWASVMLTNGKEQVIKSCVSLPELNAQVFCHSSNNVTKTECCFTDFCNNITLHLPTASPNAPKLGPMETGGGTHTCPPCPAPELLGGPSVFLFPPKPKDTLMISRTPEVTCVVVDVSHEDPEVKFNWYVDGVEVHNAKTKPREEQYNSTYRVVSVLTVLHQDWLNGKEYKCKVSNKALPAPIEKTISKAKGQPREPQVYTLPPSREEMTKNQVSLTCLVKGFYPSDIAVEWESNGQPENNYDTTPPVLDSDGSFFLYSDLTVDKSRWQQGNVFSCSVMHEALHNHYTQKSLSLSPG

SEQ ID NO: 131-132 - skipped (2 entries)

SEQ ID NO: 133 - protein, 342 aa, Artificial Sequence
  Description of Artificial Sequence: Synthetic polypeptide
MDAMKRGLCCVLLLCGAVFVSPGAGLKCVCLLCDSSNFTCQTEGACWASVMLTNGKEQVIKSCVSLPELNAQVFCHSSNNVTKTECCFTDFCNNITLHLPTASPNAPKLGPMETGGGTHTCPPCPAPELLGGPSVFLFPPKPKDTLMISRTPEVTCVVVDVSHEDPEVKFNWYVDGVEVHNAKTKPREEQYNSTYRVVSVLTVLHQDWLNGKEYKCKVSNKALPAPIEKTISKAKGQPREPQVCTLPPSREEMTKNQVSLSCAVKGFYPSDIAVEWESNGQPENNYKTTPPVLDSDGSFFLVSKLTVDKSRWQQGNVFSCSVMHEALHNHYTQKSLSLSPGK

SEQ ID NO: 134 - protein, 318 aa, Artificial Sequence
  Description of Artificial Sequence: Synthetic polypeptide
GLKCVCLLCDSSNFTCQTEGACWASVMLTNGKEQVIKSCVSLPELNAQVFCHSSNNVTKTECCFTDFCNNITLHLPTASPNAPKLGPMETGGGTHTCPPCPAPELLGGPSVFLFPPKPKDTLMISRTPEVTCVVVDVSHEDPEVKFNWYVDGVEVHNAKTKPREEQYNSTYRVVSVLTVLHQDWLNGKEYKCKVSNKALPAPIEKTISKAKGQPREPQVCTLPPSREEMTKNQVSLSCAVKGFYPSDIAVEWESNGQPENNYKTTPPVLDSDGSFFLVSKLTVDKSRWQQGNVFSCSVMHEALHNHYTQKSLSLSPGK

SEQ ID NO: 135-220 - skipped (86 entries)

SEQ ID NO: 221 - DNA, 1515 bp, Homo sapiens
atggcggagtcggccggagcctcctccttcttcccccttgttgtcctcctgctcgccggcagcggcgggtccgggccccggggggtccaggctctgctgtgtgcgtgcaccagctgcctccaggccaactacacgtgtgagacagatggggcctgcatggtttccattttcaatctggatgggatggagcaccatgtgcgcacctgcatccccaaagtggagctggtccctgccgggaagcccttctactgcctgagctcggaggacctgcgcaacacccactgctgctacactgactactgcaacaggatcgacttgagggtgcccagtggtcacctcaaggagcctgagcacccgtccatgtggggcccggtggagctggtaggcatcatcgccggcccggtgttcctcctgttcctcatcatcatcattgttttccttgtcattaactatcatcagcgtgtctatcacaaccgccagagactggacatggaagatccctcatgtgagatgtgtctctccaaagacaagacgctccaggatcttgtctacgatctctccacctcagggtctggctcagggttacccctctttgtccagcgcacagtggcccgaaccatcgttttacaagagattattggcaagggtcggtttggggaagtatggcggggccgctggaggggtggtgatgtggctgtgaaaatattctcttctcgtgaagaacggtcttggttcagggaagcagagatataccagacggtcatgctgcgccatgaaaacatccttggatttattgctgctgacaataaagataatggcacctggacacagctgtggcttgtttctgactatcatgagcacgggtccctgtttgattatctgaaccggtacacagtgacaattgaggggatgattaagctggccttgtctgctgctagtgggctggcacacctgcacatggagatcgtgggcacccaagggaagcctggaattgctcatcgagacttaaagtcaaagaacattctggtgaagaaaaatggcatgtgtgccatagcagacctgggcctggctgtccgtcatgatgcagtcactgacaccattgacattgccccgaatcagagggtggggaccaaacgatacatggcccctgaagtacttgatgaaaccattaatatgaaacactttgactcctttaaatgtgctgatatttatgccctcgggcttgtatattgggagattgctcgaagatgcaattctggaggagtccatgaagaatatcagctgccatattacgacttagtgccctctgacccttccattgaggaaatgcgaaaggttgtatgtgatcagaagctgcgtcccaacatccccaactggtggcagagttatgaggcactgcgggtgatggggaagatgatgcgagagtgttggtatgccaacggcgcagcccgcctgacggccctgcgcatcaagaagaccctctcccagctcagcgtgcaggaagacgtgaagatc

SEQ ID NO: 222 - DNA, 309 bp, Homo sapiens
tccgggccccggggggtccaggctctgctgtgtgcgtgcaccagctgcctccaggccaactacacgtgtgagacagatggggcctgcatggtttccattttcaatctggatgggatggagcaccatgtgcgcacctgcatccccaaagtggagctggtccctgccgggaagcccttctactgcctgagctcggaggacctgcgcaacacccactgctgctacactgactactgcaacaggatcgacttgagggtgcccagtggtcacctcaaggagcctgagcacccgtccatgtggggcccggtggag

SEQ ID NO: 223 - DNA, 1638 bp, Homo sapiens
atggcggagtcggccggagcctcctccttcttcccccttgttgtcctcctgctcgccggcagcggcgggtccgggccccggggggtccaggctctgctgtgtgcgtgcaccagctgcctccaggccaactacacgtgtgagacagatggggcctgcatggtttccattttcaatctggatgggatggagcaccatgtgcgcacctgcatccccaaagtggagctggtccctgccgggaagcccttctactgcctgagctcggaggacctgcgcaacacccactgctgctacactgactactgcaacaggatcgacttgagggtgcccagtggtcacctcaaggagcctgagcacccgtccatgtggggcccggtggagctggtaggcatcatcgccggcccggtgttcctcctgttcctcatcatcatcattgttttccttgtcattaactatcatcagcgtgtctatcacaaccgccagagactggacatggaagatccctcatgtgagatgtgtctctccaaagacaagacgctccaggatcttgtctacgatctctccacctcagggtctggctcagggttacccctctttgtccagcgcacagtggcccgaaccatcgttttacaagagattattggcaagggtcggtttggggaagtatggcggggccgctggaggggtggtgatgtggctgtgaaaatattctcttctcgtgaagaacggtcttggttcagggaagcagagatataccagacggtcatgctgcgccatgaaaacatccttggatttattgctgctgacaataaagcagactgctcattcctcacattgccatgggaagttgtaatggtctctgctgcccccaagctgaggagccttagactccaatacaagggaggaaggggaagagcaagatttttattcccactgaataatggcacctggacacagctgtggcttgtttctgactatcatgagcacgggtccctgtttgattatctgaaccggtacacagtgacaattgaggggatgattaagctggccttgtctgctgctagtgggctggcacacctgcacatggagatcgtgggcacccaagggaagcctggaattgctcatcgagacttaaagtcaaagaacattctggtgaagaaaaatggcatgtgtgccatagcagacctgggcctggctgtccgtcatgatgcagtcactgacaccattgacattgccccgaatcagagggtggggaccaaacgatacatggcccctgaagtacttgatgaaaccattaatatgaaacactttgactcctttaaatgtgctgatatttatgccctcgggcttgtatattgggagattgctcgaagatgcaattctggaggagtccatgaagaatatcagctgccatattacgacttagtgccctctgacccttccattgaggaaatgcgaaaggttgtatgtgatcagaagctgcgtcccaacatccccaactggtggcagagttatgaggcactgcgggtgatggggaagatgatgcgagagtgttggtatgccaacggcgcagcccgcctgacggccctgcgcatcaagaagaccctctcccagctcagcgtgcaggaagacgtgaagatc

SEQ ID NO: 224 - DNA, 309 bp, Homo sapiens; identical to SEQ ID NO: 222

SEQ ID NO: 225-232 - skipped (8 entries)

SEQ ID NO: 233 - DNA, 1479 bp, Homo sapiens
atgacccgggcgctctgctcagcgctccgccaggctctcctgctgctcgcagcggccgccgagctctcgccaggactgaagtgtgtatgtcttttgtgtgattcttcaaactttacctgccaaacagaaggagcatgttgggcatcagtcatgctaaccaatggaaaagagcaggtgatcaaatcctgtgtctcccttccagaactgaatgctcaagtcttctgtcatagttccaacaatgttaccaaaaccgaatgctgcttcacagatttttgcaacaacataacactgcaccttccaacagcatcaccaaatgccccaaaacttggacccatggagctggccatcattattactgtgcctgtttgcctcctgtccatagctgcgatgctgacagtatgggcatgccagggtcgacagtgctcctacaggaagaaaaagagaccaaatgtggaggaaccactctctgagtgcaatctggtaaatgctggaaaaactctgaaagatctgatttatgatgtgaccgcctctggatctggctctggtctacctctgttggttcaaaggacaattgcaaggacgattgtgcttcaggaaatagtaggaaaaggtagatttggtgaggtgtggcatggaagatggtgtggggaagatgtggctgtgaaaatattctcctccagagatgaaagatcttggtttcgtgaggcagaaatttaccagacggtcatgctgcgacatgaaaacatccttggtttcattgctgctgacaacaaagataatggaacttggactcaactttggctggtatctgaatatcatgaacagggctccttatatgactatttgaatagaaatatagtgaccgtggctggaatgatcaagctggcgctctcaattgctagtggtctggcacaccttcatatggagattgttggtacacaaggtaaacctgctattgctcatcgagacataaaatcaaagaatatcttagtgaaaaagtgtgaaacttgtgccatagcggacttagggttggctgtgaagcatgattcaatactgaacactatcgacatacctcagaatcctaaagtgggaaccaagaggtatatggctcctgaaatgcttgatgatacaatgaatgtgaatatctttgagtccttcaaacgagctgacatctattctgttggtctggtttactgggaaatagcccggaggtgttcagtcggaggaattgttgaggagtaccaattgccttattatgacatggtgccttcagatccctcgatagaggaaatgagaaaggttgtttgtgaccagaagtttcgaccaagtatcccaaaccagtggcaaagttgtgaagcactccgagtcatggggagaataatgcgtgagtgttggtatgccaacggagcggcccgcctaactgctcttcgtattaagaagactatatctcaactttgtgtcaaagaagactgcaaagcc

SEQ ID NO: 234 - DNA, 279 bp, Homo sapiens
gagctctcgccaggactgaagtgtgtatgtcttttgtgtgattcttcaaactttacctgccaaacagaaggagcatgttgggcatcagtcatgctaaccaatggaaaagagcaggtgatcaaatcctgtgtctcccttccagaactgaatgctcaagtcttctgtcatagttccaacaatgttaccaaaaccgaatgctgcttcacagatttttgcaacaacataacactgcaccttccaacagcatcaccaaatgccccaaaacttggacccatggag

SEQ ID NO: 235 - DNA, 1329 bp, Homo sapiens
atgctaaccaatggaaaagagcaggtgatcaaatcctgtgtctcccttccagaactgaatgctcaagtcttctgtcatagttccaacaatgttaccaaaaccgaatgctgcttcacagatttttgcaacaacataacactgcaccttccaacagcatcaccaaatgccccaaaacttggacccatggagctggccatcattattactgtgcctgtttgcctcctgtccatagctgcgatgctgacagtatgggcatgccagggtcgacagtgctcctacaggaagaaaaagagaccaaatgtggaggaaccactctctgagtgcaatctggtaaatgctggaaaaactctgaaagatctgatttatgatgtgaccgcctctggatctggctctggtctacctctgttggttcaaaggacaattgcaaggacgattgtgcttcaggaaatagtaggaaaaggtagatttggtgaggtgtggcatggaagatggtgtggggaagatgtggctgtgaaaatattctcctccagagatgaaagatcttggtttcgtgaggcagaaatttaccagacggtcatgctgcgacatgaaaacatccttggtttcattgctgctgacaacaaagataatggaacttggactcaactttggctggtatctgaatatcatgaacagggctccttatatgactatttgaatagaaatatagtgaccgtggctggaatgatcaagctggcgctctcaattgctagtggtctggcacaccttcatatggagattgttggtacacaaggtaaacctgctattgctcatcgagacataaaatcaaagaatatcttagtgaaaaagtgtgaaacttgtgccatagcggacttagggttggctgtgaagcatgattcaatactgaacactatcgacatacctcagaatcctaaagtgggaaccaagaggtatatggctcctgaaatgcttgatgatacaatgaatgtgaatatctttgagtccttcaaacgagctgacatctattctgttggtctggtttactgggaaatagcccggaggtgttcagtcggaggaattgttgaggagtaccaattgccttattatgacatggtgccttcagatccctcgatagaggaaatgagaaaggttgtttgtgaccagaagtttcgaccaagtatcccaaaccagtggcaaagttgtgaagcactccgagtcatggggagaataatgcgtgagtgttggtatgccaacggagcggcccgcctaactgctcttcgtattaagaagactatatctcaactttgtgtcaaagaagactgcaaagcc

SEQ ID NO: 236 - DNA, 189 bp, Homo sapiens
atgctaaccaatggaaaagagcaggtgatcaaatcctgtgtctcccttccagaactgaatgctcaagtcttctgtcatagttccaacaatgttaccaaaaccgaatgctgcttcacagatttttgcaacaacataacactgcaccttccaacagcatcaccaaatgccccaaaacttggacccatggag

SEQ ID NO: 237 - DNA, 1239 bp, Homo sapiens
atgacccgggcgctctgctcagcgctccgccaggctctcctgctgctcgcagcggccgccgagctctcgccaggactgaagtgtgtatgtcttttgtgtgattcttcaaactttacctgccaaacagaaggagcatgttgggcatcagtcatgctaaccaatggaaaagagcaggtgatcaaatcctgtgtctcccttccagaactgaatgctcaagtcttctgtcatagttccaacaatgttaccaaaaccgaatgctgcttcacagatttttgcaacaacataacactgcaccttccaacaggtctacctctgttggttcaaaggacaattgcaaggacgattgtgcttcaggaaatagtaggaaaaggtagatttggtgaggtgtggcatggaagatggtgtggggaagatgtggctgtgaaaatattctcctccagagatgaaagatcttggtttcgtgaggcagaaatttaccagacggtcatgctgcgacatgaaaacatccttggtttcattgctgctgacaacaaagataatggaacttggactcaactttggctggtatctgaatatcatgaacagggctccttatatgactatttgaatagaaatatagtgaccgtggctggaatgatcaagctggcgctctcaattgctagtggtctggcacaccttcatatggagattgttggtacacaaggtaaacctgctattgctcatcgagacataaaatcaaagaatatcttagtgaaaaagtgtgaaacttgtgccatagcggacttagggttggctgtgaagcatgattcaatactgaacactatcgacatacctcagaatcctaaagtgggaaccaagaggtatatggctcctgaaatgcttgatgatacaatgaatgtgaatatctttgagtccttcaaacgagctgacatctattctgttggtctggtttactgggaaatagcccggaggtgttcagtcggaggaattgttgaggagtaccaattgccttattatgacatggtgccttcagatccctcgatagaggaaatgagaaaggttgtttgtgaccagaagtttcgaccaagtatcccaaaccagtggcaaagttgtgaagcactccgagtcatggggagaataatgcgtgagtgttggtatgccaacggagcggcccgcctaactgctcttcgtattaagaagactatatctcaactttgtgtcaaagaagactgcaaagcc

SEQ ID NO: 238 - DNA, 1179 bp, Homo sapiens
gagctctcgccaggactgaagtgtgtatgtcttttgtgtgattcttcaaactttacctgccaaacagaaggagcatgttgggcatcagtcatgctaaccaatggaaaagagcaggtgatcaaatcctgtgtctcccttccagaactgaatgctcaagtcttctgtcatagttccaacaatgttaccaaaaccgaatgctgcttcacagatttttgcaacaacataacactgcaccttccaacaggtctacctctgttggttcaaaggacaattgcaaggacgattgtgcttcaggaaatagtaggaaaaggtagatttggtgaggtgtggcatggaagatggtgtggggaagatgtggctgtgaaaatattctcctccagagatgaaagatcttggtttcgtgaggcagaaatttaccagacggtcatgctgcgacatgaaaacatccttggtttcattgctgctgacaacaaagataatggaacttggactcaactttggctggtatctgaatatcatgaacagggctccttatatgactatttgaatagaaatatagtgaccgtggctggaatgatcaagctggcgctctcaattgctagtggtctggcacaccttcatatggagattgttggtacacaaggtaaacctgctattgctcatcgagacataaaatcaaagaatatcttagtgaaaaagtgtgaaacttgtgccatagcggacttagggttggctgtgaagcatgattcaatactgaacactatcgacatacctcagaatcctaaagtgggaaccaagaggtatatggctcctgaaatgcttgatgatacaatgaatgtgaatatctttgagtccttcaaacgagctgacatctattctgttggtctggtttactgggaaatagcccggaggtgttcagtcggaggaattgttgaggagtaccaattgccttattatgacatggtgccttcagatccctcgatagaggaaatgagaaaggttgtttgtgaccagaagtttcgaccaagtatcccaaaccagtggcaaagttgtgaagcactccgagtcatggggagaataatgcgtgagtgttggtatgccaacggagcggcccgcctaactgctcttcgtattaagaagactatatctcaactttgtgtcaaagaagactgcaaagcc

SEQ ID NO: 239 - DNA, 1011 bp, Homo sapiens
atgacccgggcgctctgctcagcgctccgccaggctctcctgctgctcgcagcggccgccgagctctcgccaggactgaagtgtgtatgtcttttgtgtgattcttcaaactttacctgccaaacagaaggagcatgttgggcatcagtcatgctaaccaatggaaaagagcaggtgatcaaatcctgtgtctcccttccagaactgaatgctcaagtcttctgtcatagttccaacaatgttaccaaaaccgaatgctgcttcacagatttttgcaacaacataacactgcaccttccaacagataatggaacttggactcaactttggctggtatctgaatatcatgaacagggctccttatatgactatttgaatagaaatatagtgaccgtggctggaatgatcaagctggcgctctcaattgctagtggtctggcacaccttcatatggagattgttggtacacaaggtaaacctgctattgctcatcgagacataaaatcaaagaatatcttagtgaaaaagtgtgaaacttgtgccatagcggacttagggttggctgtgaagcatgattcaatactgaacactatcgacatacctcagaatcctaaagtgggaaccaagaggtatatggctcctgaaatgcttgatgatacaatgaatgtgaatatctttgagtccttcaaacgagctgacatctattctgttggtctggtttactgggaaatagcccggaggtgttcagtcggaggaattgttgaggagtaccaattgccttattatgacatggtgccttcagatccctcgatagaggaaatgagaaaggttgtttgtgaccagaagtttcgaccaagtatcccaaaccagtggcaaagttgtgaagcactccgagtcatggggagaataatgcgtgagtgttggtatgccaacggagcggcccgcctaactgctcttcgtattaagaagactatatctcaactttgtgtcaaagaagactgcaaagcctaa

SEQ ID NO: 240 - DNA, 951 bp, Homo sapiens
gagctctcgccaggactgaagtgtgtatgtcttttgtgtgattcttcaaactttacctgccaaacagaaggagcatgttgggcatcagtcatgctaaccaatggaaaagagcaggtgatcaaatcctgtgtctcccttccagaactgaatgctcaagtcttctgtcatagttccaacaatgttaccaaaaccgaatgctgcttcacagatttttgcaacaacataacactgcaccttccaacagataatggaacttggactcaactttggctggtatctgaatatcatgaacagggctccttatatgactatttgaatagaaatatagtgaccgtggctggaatgatcaagctggcgctctcaattgctagtggtctggcacaccttcatatggagattgttggtacacaaggtaaacctgctattgctcatcgagacataaaatcaaagaatatcttagtgaaaaagtgtgaaacttgtgccatagcggacttagggttggctgtgaagcatgattcaatactgaacactatcgacatacctcagaatcctaaagtgggaaccaagaggtatatggctcctgaaatgcttgatgatacaatgaatgtgaatatctttgagtccttcaaacgagctgacatctattctgttggtctggtttactgggaaatagcccggaggtgttcagtcggaggaattgttgaggagtaccaattgccttattatgacatggtgccttcagatccctcgatagaggaaatgagaaaggttgtttgtgaccagaagtttcgaccaagtatcccaaaccagtggcaaagttgtgaagcactccgagtcatggggagaataatgcgtgagtgttggtatgccaacggagcggcccgcctaactgctcttcgtattaagaagactatatctcaactttgtgtcaaagaagactgcaaagcctaa

SEQ ID NO: 241-242 - skipped (2 entries)

SEQ ID NO: 243 - DNA, 1065 bp, Artificial Sequence
  Description of Artificial Sequence: Synthetic polynucleotide
atggatgcaatgaagagagggctctgctgtgtgctgctgctgtgtggagcagtcttcgtttcgcccggcgcctccgggccccggggggtccaggctctgctgtgtgcgtgcaccagctgcctccaggccaactacacgtgtgagacagatggggcctgcatggtttccattttcaatctggatgggatggagcaccatgtgcgcacctgcatccccaaagtggagctggtccctgccgggaagcccttctactgcctgagctcggaggacctgcgcaacacccactgctgctacactgactactgcaacaggatcgacttgagggtgcccagtggtcacctcaaggagcctgagcacccgtccatgtggggcccggtggagaccggtggtggaactcacacatgcccaccgtgcccagcacctgaactcctggggggaccgtcagtcttcctcttccccccaaaacccaaggacaccctcatgatctcccggacccctgaggtcacatgcgtggtggtggacgtgagccacgaagaccctgaggtcaagttcaactggtacgtggacggcgtggaggtgcataatgccaagacaaagccgcgggaggagcagtacaacagcacgtaccgtgtggtcagcgtcctcaccgtcctgcaccaggactggctgaatggcaaggagtacaagtgcaaggtctccaacaaagccctcccagcccccatcgagaaaaccatctccaaagccaaagggcagccccgagaaccacaggtgtacaccctgcccccatcccgggaggagatgaccaagaaccaggtcagcctgacctgcctggtcaaaggcttctatcccagcgacatcgccgtggagtgggagagcaatgggcagccggagaacaactacgacaccacgcctcccgtgctggactccgacggctccttcttcctctatagcgacctcaccgtggacaagagcaggtggcagcaggggaacgtcttctcatgctccgtgatgcatgaggctctgcacaaccactacacgcagaagagcctctccctgtctccgggt

SEQ ID NO: 244-245 - skipped (2 entries)

SEQ ID NO: 246 - protein, 22 aa, Unknown
  Description of Unknown: Tissue plasminogen activator peptide
MDAMKRGLCCVLLLCGAVFVSP

SEQ ID NO: 247 - protein, 356 aa, Artificial Sequence
  Description of Artificial Sequence: Synthetic polypeptide
MDAMKRGLCCVLLLCGAVFVSPGASGPRGVQALLCACTSCLQANYTCETDGACMVSIFNLDGMEHHVRTCIPKVELVPAGKPFYCLSSEDLRNTHCCYTDYCNRIDLRVPSGHLKEPEHPSMWGPVETGGGTHTCPPCPAPELLGGPSVFLFPPKPKDTLMISRTPEVTCVVVDVSHEDPEVKFNWYVDGVEVHNAKTKPREEQYNSTYRVVSVLTVLHQDWLNGKEYKCKVSNKALPAPIEKTISKAKGQPREPQVCTLPPSREEMTKNQVSLSCAVKGFYPSDIAVEWESRGQPENNYKTTPPVLDSRGSFFLVSKLTVDKSRWQQGNVFSCSVMHEALHNHYTQKSLSLSPGK

SEQ ID NO: 248 - DNA, 1068 bp, Artificial Sequence
  Description of Artificial Sequence: Synthetic polynucleotide
atggatgcaatgaagagagggctctgctgtgtgctgctgctgtgtggagcagtcttcgtttcgcccggcgcctccgggccccggggggtccaggctctgctgtgtgcgtgcaccagctgcctccaggccaactacacgtgtgagacagatggggcctgcatggtttccattttcaatctggatgggatggagcaccatgtgcgcacctgcatccccaaagtggagctggtccctgccgggaagcccttctactgcctgagctcggaggacctgcgcaacacccactgctgctacactgactactgcaacaggatcgacttgagggtgcccagtggtcacctcaaggagcctgagcacccgtccatgtggggcccggtggagaccggtggtggaactcacacatgcccaccgtgcccagcacctgaactcctggggggaccgtcagtcttcctcttccccccaaaacccaaggacaccctcatgatctcccggacccctgaggtcacatgcgtggtggtggacgtgagccacgaagaccctgaggtcaagttcaactggtacgtggacggcgtggaggtgcataatgccaagacaaagccgcgggaggagcagtacaacagcacgtaccgtgtggtcagcgtcctcaccgtcctgcaccaggactggctgaatggcaaggagtacaagtgcaaggtctccaacaaagccctcccagcccccatcgagaaaaccatctccaaagccaaagggcagccccgagaaccacaggtgtgcaccctgcccccatcccgggaggagatgaccaagaaccaggtcagcctgtcctgcgccgtcaaaggcttctatcccagcgacatcgccgtggagtgggagagccgcgggcagccggagaacaactacaagaccacgcctcccgtgctggactcccgcggctccttcttcctcgtgagcaagctcaccgtggacaagagcaggtggcagcaggggaacgtcttctcatgctccgtgatgcatgaggctctgcacaaccactacacgcagaagagcctctccctgtctccgggtaaa

SEQ ID NO: 249 - protein, 332 aa, Artificial Sequence
  Description of Artificial Sequence: Synthetic polypeptide
SGPRGVQALLCACTSCLQANYTCETDGACMVSIFNLDGMEHHVRTCIPKVELVPAGKPFYCLSSEDLRNTHCCYTDYCNRIDLRVPSGHLKEPEHPSMWGPVETGGGTHTCPPCPAPELLGGPSVFLFPPKPKDTLMISRTPEVTCVVVDVSHEDPEVKFNWYVDGVEVHNAKTKPREEQYNSTYRVVSVLTVLHQDWLNGKEYKCKVSNKALPAPIEKTISKAKGQPREPQVCTLPPSREEMTKNQVSLSCAVKGFYPSDIAVEWESRGQPENNYKTTPPVLDSRGSFFLVSKLTVDKSRWQQGNVFSCSVMHEALHNHYTQKSLSLSPGK

SEQ ID NO: 250 - DNA, 996 bp, Artificial Sequence
  Description of Artificial Sequence: Synthetic polynucleotide
tccgggccccggggggtccaggctctgctgtgtgcgtgcaccagctgcctccaggccaactacacgtgtgagacagatggggcctgcatggtttccattttcaatctggatgggatggagcaccatgtgcgcacctgcatccccaaagtggagctggtccctgccgggaagcccttctactgcctgagctcggaggacctgcgcaacacccactgctgctacactgactactgcaacaggatcgacttgagggtgcccagtggtcacctcaaggagcctgagcacccgtccatgtggggcccggtggagaccggtggtggaactcacacatgcccaccgtgcccagcacctgaactcctggggggaccgtcagtcttcctcttccccccaaaacccaaggacaccctcatgatctcccggacccctgaggtcacatgcgtggtggtggacgtgagccacgaagaccctgaggtcaagttcaactggtacgtggacggcgtggaggtgcataatgccaagacaaagccgcgggaggagcagtacaacagcacgtaccgtgtggtcagcgtcctcaccgtcctgcaccaggactggctgaatggcaaggagtacaagtgcaaggtctccaacaaagccctcccagcccccatcgagaaaaccatctccaaagccaaagggcagccccgagaaccacaggtgtgcaccctgcccccatcccgggaggagatgaccaagaaccaggtcagcctgtcctgcgccgtcaaaggcttctatcccagcgacatcgccgtggagtgggagagccgcgggcagccggagaacaactacaagaccacgcctcccgtgctggactcccgcggctccttcttcctcgtgagcaagctcaccgtggacaagagcaggtggcagcaggggaacgtcttctcatgctccgtgatgcatgaggctctgcacaaccactacacgcagaagagcctctccctgtctccgggtaaa

SEQ ID NO: 251 - DNA, 1068 bp, Artificial Sequence
  Description of Artificial Sequence: Synthetic polynucleotide
atggatgcaatgaagagagggctctgctgtgtgctgctgctgtgtggagcagtcttcgtttcgcccggcgcctccgggccccggggggtccaggctctgctgtgtgcgtgcaccagctgcctccaggccaactacacgtgtgagacagatggggcctgcatggtttccattttcaatctggatgggatggagcaccatgtgcgcacctgcatccccaaagtggagctggtccctgccgggaagcccttctactgcctgagctcggaggacctgcgcaacacccactgctgctacactgactactgcaacaggatcgacttgagggtgcccagtggtcacctcaaggagcctgagcacccgtccatgtggggcccggtggagaccggtggtggaactcacacatgcccaccgtgcccagcacctgaactcctggggggaccgtcagtcttcctcttccccccaaaacccaaggacaccctcatgatctcccggacccctgaggtcacatgcgtggtggtggacgtgagccacgaagaccctgaggtcaagttcaactggtacgtggacggcgtggaggtgcataatgccaagacaaagccgcgggaggagcagtacaacagcacgtaccgtgtggtcagcgtcctcaccgtcctgcaccaggactggctgaatggcaaggagtacaagtgcaaggtctccaacaaagccctcccagcccccatcgagaaaaccatctccaaagccaaagggcagccccgagaaccacaggtgtgcaccctgcccccatcccgggaggagatgaccaagaaccaggtcagcctgtcctgcgccgtcaaaggcttctatcccagcgacatcgccgtggagtgggagagcaatgggcagccggagaacaactacaagaccacgcctcccgtgctggactccgacggctccttcttcctcgtgagcaagctcaccgtggacaagagcaggtggcagcaggggaacgtcttctcatgctccgtgatgcatgaggctctgcacaaccactacacgcagaagagcctctccctgtctccgggtaaa

SEQ ID NO: 252 - DNA, 996 bp, Artificial Sequence
  Description of Artificial Sequence: Synthetic polynucleotide
tccgggccccggggggtccaggctctgctgtgtgcgtgcaccagctgcctccaggccaactacacgtgtgagacagatggggcctgcatggtttccattttcaatctggatgggatggagcaccatgtgcgcacctgcatccccaaagtggagctggtccctgccgggaagcccttctactgcctgagctcggaggacctgcgcaacacccactgctgctacactgactactgcaacaggatcgacttgagggtgcccagtggtcacctcaaggagcctgagcacccgtccatgtggggcccggtggagaccggtggtggaactcacacatgcccaccgtgcccagcacctgaactcctggggggaccgtcagtcttcctcttccccccaaaacccaaggacaccctcatgatctcccggacccctgaggtcacatgcgtggtggtggacgtgagccacgaagaccctgaggtcaagttcaactggtacgtggacggcgtggaggtgcataatgccaagacaaagccgcgggaggagcagtacaacagcacgtaccgtgtggtcagcgtcctcaccgtcctgcaccaggactggctgaatggcaaggagtacaagtgcaaggtctccaacaaagccctcccagcccccatcgagaaaaccatctccaaagccaaagggcagccccgagaaccacaggtgtgcaccctgcccccatcccgggaggagatgaccaagaaccaggtcagcctgtcctgcgccgtcaaaggcttctatcccagcgacatcgccgtggagtgggagagcaatgggcagccggagaacaactacaagaccacgcctcccgtgctggactccgacggctccttcttcctcgtgagcaagctcaccgtggacaagagcaggtggcagcaggggaacgtcttctcatgctccgtgatgcatgaggctctgcacaaccactacacgcagaagagcctctccctgtctccgggtaaa

SEQ ID NO: 253-254 - skipped (2 entries)

SEQ ID NO: 255 - DNA, 1023 bp, Artificial Sequence
  Description of Artificial Sequence: Synthetic polynucleotide
atggatgcaatgaagagagggctctgctgtgtgctgctgctgtgtggagcagtcttcgtttcgcccggcgccggactgaagtgtgtatgtcttttgtgtgattcttcaaactttacctgccaaacagaaggagcatgttgggcatcagtcatgctaaccaatggaaaagagcaggtgatcaaatcctgtgtctcccttccagaactgaatgctcaagtcttctgtcatagttccaacaatgttaccaaaaccgaatgctgcttcacagatttttgcaacaacataacactgcaccttccaacagcatcaccaaatgccccaaaacttggacccatggagaccggtggtggaactcacacatgcccaccgtgcccagcacctgaactcctggggggaccgtcagtcttcctcttccccccaaaacccaaggacaccctcatgatctcccggacccctgaggtcacatgcgtggtggtggacgtgagccacgaagaccctgaggtcaagttcaactggtacgtggacggcgtggaggtgcataatgccaagacaaagccgcgggaggagcagtacaacagcacgtaccgtgtggtcagcgtcctcaccgtcctgcaccaggactggctgaatggcaaggagtacaagtgcaaggtctccaacaaagccctcccagcccccatcgagaaaaccatctccaaagccaaagggcagccccgagaaccacaggtgtacaccctgcccccatcccgggaggagatgaccaagaaccaggtcagcctgacctgcctggtcaaaggcttctatcccagcgacatcgccgtggagtgggagagcaatgggcagccggagaacaactacgacaccacgcctcccgtgctggactccgacggctccttcttcctctatagcgacctcaccgtggacaagagcaggtggcagcaggggaacgtcttctcatgctccgtgatgcatgaggctctgcacaaccactacacgcagaagagcctctccctgtctccgggt

SEQ ID NO: 256-260 - skipped (5 entries)

SEQ ID NO: 261 - protein, 3 aa, Artificial Sequence
  Description of Artificial Sequence: Synthetic peptide
GGG

SEQ ID NO: 262 - protein, 4 aa, Artificial Sequence
  Description of Artificial Sequence: Synthetic peptide
GGGG

SEQ ID NO: 263 - protein, 5 aa, Artificial Sequence
  Description of Artificial Sequence: Synthetic peptide
TGGGG

SEQ ID NO: 264 - protein, 5 aa, Artificial Sequence
  Description of Artificial Sequence: Synthetic peptide
SGGGG

SEQ ID NO: 265 - protein, 4 aa, Artificial Sequence
  Description of Artificial Sequence: Synthetic peptide
TGGG

SEQ ID NO: 266 - protein, 4 aa, Artificial Sequence
  Description of Artificial Sequence: Synthetic peptide
SGGG

SEQ ID NO: 267 - protein, 5 aa, Artificial Sequence
  Description of Artificial Sequence: Synthetic peptide
  See specification as filed for detailed description of substitutions and preferred embodiments
GGGGS

SEQ ID NO: 268 - protein, 10 aa, Artificial Sequence
  Description of Artificial Sequence: Synthetic peptide
  See specification as filed for detailed description of substitutions and preferred embodiments
GGGGSGGGGS

SEQ ID NO: 269 - protein, 11 aa, Artificial Sequence
  Description of Artificial Sequence: Synthetic peptide
TGGGGSGGGGS

SEQ ID NO: 270 - protein, 16 aa, Artificial Sequence
  Description of Artificial Sequence: Synthetic peptide
TGGGGSGGGGSGGGGS

SEQ ID NO: 271 - protein, 21 aa, Artificial Sequence
  Description of Artificial Sequence: Synthetic peptide
TGGGGSGGGGSGGGGSGGGGS

SEQ ID NO: 272 - protein, 26 aa, Artificial Sequence
  Description of Artificial Sequence: Synthetic peptide
TGGGGSGGGGSGGGGSGGGGSGGGGS

SEQ ID NO: 273 - protein, 31 aa, Artificial Sequence
  Description of Artificial Sequence: Synthetic polypeptide
TGGGGSGGGGSGGGGSGGGGSGGGGSGGGGS

SEQ ID NO: 274 - protein, 36 aa, Artificial Sequence
  Description of Artificial Sequence: Synthetic polypeptide
TGGGGSGGGGSGGGGSGGGGSGGGGSGGGGSGGGGS

SEQ ID NO: 275 - protein, 10 aa, Artificial Sequence
  Description of Artificial Sequence: Synthetic peptide
TGGGPKSCDK

SEQ ID NO: 276 - protein, 368 aa, Artificial Sequence
  Description of Artificial Sequence: Synthetic polypeptide
MDAMKRGLCCVLLLCGAVFVSPGASGRGEAETRECIYYNANWELERTNQSGLERCEGEQDKRLHCYASWRNSSGTIELVKKGCWLDDIRCYDRQECVATEENPQVYFCCCEGNFCNERFTHLPEAGGPEVTYEPPPTAPTGGGTHTCPPCPAPELLGGPSVFLFPPKPKDTLMISRTPEVTCVVVDVSHEDPEVKFNWYVDGVEVHNAKTKPREEQYNSTYRVVSVLTVLHQDWLNGKEYKCKVSNKALPAPIEKTISKAKGQPREPQVYTLPPSREEMTKNQVSLTCLVKGFYPSDIAVEWESNGQPENNYKTTPPVLDSDGSFFLYSKLTVDKSRWQQGNVFSCSVMHEALHNHYTQKSLSLSPGK

SEQ ID NO: 277 - DNA, 1107 bp, Artificial Sequence
  Description of Artificial Sequence: Synthetic polynucleotide
atggatgcaatgaagagagggctctgctgtgtgctgctgctgtgtggagcagtcttcgtttcgcccggcgcctctgggcgtggggaggctgagacacgggagtgcatctactacaacgccaactgggagctggagcgcaccaaccagagcggcctggagcgctgcgaaggcgagcaggacaagcggctgcactgctacgcctcctggcgcaacagctctggcaccatcgagctcgtgaagaagggctgctggctagatgacatccgttgctacgataggcaggagtgtgtggccactgaggagaacccccaggtgtacttctgctgctgtgaaggcaacttctgcaacgagcgcttcactcatttgccagaggctgggggcccggaagtcacgtacgagccacccccgacagcccccaccggtggtggaactcacacatgcccaccgtgcccagcacctgaactcctggggggaccgtcagtcttcctcttccccccaaaacccaaggacaccctcatgatctcccggacccctgaggtcacatgcgtggtggtggacgtgagccacgaagaccctgaggtcaagttcaactggtacgtggacggcgtggaggtgcataatgccaagacaaagccgcgggaggagcagtacaacagcacgtaccgtgtggtcagcgtcctcaccgtcctgcaccaggactggctgaatggcaaggagtacaagtgcaaggtctccaacaaagccctcccagcccccatcgagaaaaccatctccaaagccaaagggcagccccgagaaccacaggtgtacaccctgcccccatcccgggaggagatgaccaagaaccaggtcagcctgacctgcctggtcaaaggcttctatcccagcgacatcgccgtggagtgggagagcaatgggcagccggagaacaactacaagaccacgcctcccgtgctggactccgacggctccttcttcctctatagcaagctcaccgtggacaagagcaggtggcagcaggggaacgtcttctcatgctccgtgatgcatgaggctctgcacaaccactacacgcagaagagcctctccctgtctccgggtaaatga

SEQ ID NO: 278 - protein, 343 aa, Artificial Sequence
  Description of Artificial Sequence: Synthetic polypeptide
GRGEAETRECIYYNANWELERTNQSGLERCEGEQDKRLHCYASWRNSSGTIELVKKGCWLDDIRCYDRQECVATEENPQVYFCCCEGNFCNERFTHLPEAGGPEVTYEPPPTAPTGGGTHTCPPCPAPELLGGPSVFLFPPKPKDTLMISRTPEVTCVVVDVSHEDPEVKFNWYVDGVEVHNAKTKPREEQYNSTYRVVSVLTVLHQDWLNGKEYKCKVSNKALPAPIEKTISKAKGQPREPQVYTLPPSREEMTKNQVSLTCLVKGFYPSDIAVEWESNGQPENNYKTTPPVLDSDGSFFLYSKLTVDKSRWQQGNVFSCSVMHEALHNHYTQKSLSLSPGK

SEQ ID NO: 279 - protein, 368 aa, Artificial Sequence
  Description of Artificial Sequence: Synthetic polypeptide
MDAMKRGLCCVLLLCGAVFVSPGASGRGEAETRECIYYNANWELERTNQSGLERCEGEQDKRLHCYASWRNSSGTIELVKKGCWLDDKRCYDRQECVATEENPQVYFCCCEGNFCNERFTHLPEAGGPEVTYEPPPTAPTGGGTHTCPPCPAPELLGGPSVFLFPPKPKDTLMISRTPEVTCVVVDVSHEDPEVKFNWYVDGVEVHNAKTKPREEQYNSTYRVVSVLTVLHQDWLNGKEYKCKVSNKALPAPIEKTISKAKGQPREPQVYTLPPSREEMTKNQVSLTCLVKGFYPSDIAVEWESNGQPENNYKTTPPVLDSDGSFFLYSKLTVDKSRWQQGNVFSCSVMHEALHNHYTQKSLSLSPGK

SEQ ID NO: 280 - protein, 4 aa, Artificial Sequence
  Description of Artificial Sequence: Synthetic peptide
GGGA

SEQ ID NO: 281 - protein, 4 aa, Artificial Sequence
  Description of Artificial Sequence: Synthetic peptide
GGGS

SEQ ID NO: 282 - protein, 5 aa, Artificial Sequence
  Description of Artificial Sequence: Synthetic peptide
GGGGA

SEQ ID NO: 283 - protein, 5 aa, Artificial Sequence
  Description of Artificial Sequence: Synthetic peptide
GGGGG

SEQ ID NO: 284 - protein, 4 aa, Artificial Sequence
  Description of Artificial Sequence: Synthetic peptide
GGAG

SEQ ID NO: 285 - protein, 4 aa, Artificial Sequence
  Description of Artificial Sequence: Synthetic peptide
GGSG

SEQ ID NO: 286 - protein, 4 aa, Artificial Sequence
  Description of Artificial Sequence: Synthetic peptide
AGGG

SEQ ID NO: 287 - protein, 4 aa, Artificial Sequence
  Description of Artificial Sequence: Synthetic peptide
GAGA

SEQ ID NO: 288 - protein, 4 aa, Artificial Sequence
  Description of Artificial Sequence: Synthetic peptide
GSGS

SEQ ID NO: 289 - protein, 6 aa, Artificial Sequence
  Description of Artificial Sequence: Synthetic peptide
GAGAGA

SEQ ID NO: 290 - protein, 6 aa, Artificial Sequence
  Description of Artificial Sequence: Synthetic peptide
GSGSGS

SEQ ID NO: 291 - protein, 8 aa, Artificial Sequence
  Description of Artificial Sequence: Synthetic peptide
GAGAGAGA

SEQ ID NO: 292 - protein, 8 aa, Artificial Sequence
  Description of Artificial Sequence: Synthetic peptide
GSGSGSGS

SEQ ID NO: 293 - protein, 10 aa, Artificial Sequence
  Description of Artificial Sequence: Synthetic peptide
GAGAGAGAGA

SEQ ID NO: 294 - protein, 10 aa, Artificial Sequence
  Description of Artificial Sequence: Synthetic peptide
GSGSGSGSGS

SEQ ID NO: 295 - protein, 12 aa, Artificial Sequence
  Description of Artificial Sequence: Synthetic peptide
GAGAGAGAGAGA

SEQ ID NO: 296 - protein, 12 aa, Artificial Sequence
  Description of Artificial Sequence: Synthetic peptide
GSGSGSGSGSGS

SEQ ID NO: 297 - protein, 6 aa, Artificial Sequence
  Description of Artificial Sequence: Synthetic peptide
GGAGGA

SEQ ID NO: 298 - protein, 6 aa, Artificial Sequence
  Description of Artificial Sequence: Synthetic peptide
GGSGGS

SEQ ID NO: 299 - protein, 9 aa, Artificial Sequence
  Description of Artificial Sequence: Synthetic peptide
GGAGGAGGA

SEQ ID NO: 300 - protein, 9 aa, Artificial Sequence
  Description of Artificial Sequence: Synthetic peptide
GGSGGSGGS

SEQ ID NO: 301 - protein, 12 aa, Artificial Sequence
  Description of Artificial Sequence: Synthetic peptide
GGAGGAGGAGGA

SEQ ID NO: 302 - protein, 12 aa, Artificial Sequence
  Description of Artificial Sequence: Synthetic peptide
GGSGGSGGSGGS

SEQ ID NO: 303 - protein, 4 aa, Artificial Sequence
  Description of Artificial Sequence: Synthetic peptide
GGAG

SEQ ID NO: 304 - protein, 4 aa, Artificial Sequence
  Description of Artificial Sequence: Synthetic peptide
GGSG

SEQ ID NO: 305 - protein, 8 aa, Artificial Sequence
  Description of Artificial Sequence: Synthetic peptide
GGAGGGAG

SEQ ID NO: 306 - protein, 8 aa, Artificial Sequence
  Description of Artificial Sequence: Synthetic peptide
GGSGGGSG

SEQ ID NO: 307 - protein, 12 aa, Artificial Sequence
  Description of Artificial Sequence: Synthetic peptide
GGAGGGAGGGAG

SEQ ID NO: 308 - protein, 12 aa, Artificial Sequence
  Description of Artificial Sequence: Synthetic peptide
GGSGGGSGGGSG

SEQ ID NO: 309 - protein, 5 aa, Artificial Sequence
  Description of Artificial Sequence: Synthetic peptide
GGGGA

SEQ ID NO: 310 - protein, 15 aa, Artificial Sequence
  Description of Artificial Sequence: Synthetic peptide
GGGGAGGGGAGGGGA

SEQ ID NO: 311 - protein, 15 aa, Artificial Sequence
  Description of Artificial Sequence: Synthetic peptide
GGGGSGGGGSGGGGS

SEQ ID NO: 312 - protein, 5 aa, Artificial Sequence
  Description of Artificial Sequence: Synthetic peptide
GGGAG

SEQ ID NO: 313 - protein, 6 aa, Artificial Sequence
  Description of Artificial Sequence: Synthetic peptide
GGGAGG

SEQ ID NO: 314 - protein, 7 aa, Artificial Sequence
  Description of Artificial Sequence: Synthetic peptide
GGGAGGG

SEQ ID NO: 315 - protein, 4 aa, Artificial Sequence
  Description of Artificial Sequence: Synthetic peptide
AAAL

SEQ ID NO: 316 - protein, 4 aa, Artificial Sequence
  Description of Artificial Sequence: Synthetic peptide
AAAK

SEQ ID NO: 317 - protein, 4 aa, Artificial Sequence
  Description of Artificial Sequence: Synthetic peptide
AAAR

SEQ ID NO: 318 - protein, 14 aa, Artificial Sequence
  Description of Artificial Sequence: Synthetic peptide
EGKSSGSGSESKST

SEQ ID NO: 319 - protein, 12 aa, Artificial Sequence
  Description of Artificial Sequence: Synthetic peptide
GSAGSAAGSGEF

SEQ ID NO: 320 - protein, 12 aa, Artificial Sequence
  Description of Artificial Sequence: Synthetic peptide
AEAAAKEAAAKA

SEQ ID NO: 321 - protein, 18 aa, Artificial Sequence
  Description of Artificial Sequence: Synthetic peptide
KESGSVSSEQLAQFRSLD

SEQ ID NO: 322 - protein, 10 aa, Artificial Sequence
  Description of Artificial Sequence: Synthetic peptide
GENLYFQSGG

SEQ ID NO: 323 - protein, 8 aa, Artificial Sequence
  Description of Artificial Sequence: Synthetic peptide
SACYCELS

SEQ ID NO: 324 - protein, 5 aa, Artificial Sequence
  Description of Artificial Sequence: Synthetic peptide
RSIAT

SEQ ID NO: 325 - protein, 17 aa, Artificial Sequence
  Description of Artificial Sequence: Synthetic peptide
RPACKIPNDLKQKVMNH

SEQ ID NO: 326 - protein, 36 aa, Artificial Sequence
  Description of Artificial Sequence: Synthetic polypeptide
GGSAGGSGSGSSGGSSGASGTGTAGGTGSGSGTGSG

SEQ ID NO: 327 - protein, 17 aa, Artificial Sequence
  Description of Artificial Sequence: Synthetic peptide
AAANSSIDLISVPVDSR

SEQ ID NO: 328 - protein, 36 aa, Artificial Sequence
  Description of Artificial Sequence: Synthetic polypeptide
GGSGGGSEGGGSEGGGSEGGGSEGGGSEGGGSGGGS

SEQ ID NO: 329 - protein, 5 aa, Artificial Sequence
  Description of Artificial Sequence: Synthetic peptide
EAAAK

SEQ ID NO: 330 - protein, 5 aa, Artificial Sequence
  Description of Artificial Sequence: Synthetic peptide
PAPAP

SEQ ID NO: 331 - DNA, 1107 bp, Artificial Sequence
  Description of Artificial Sequence: Synthetic polynucleotide
atggatgcaatgaagagagggctctgctgtgtgctgctgctgtgtggagcagtcttcgtttcgcccggcgcctctgggcgtggggaggctgagacacgggagtgcatctactacaacgccaactgggagctggagcgcaccaaccagagcggcctggagcgctgcgaaggcgagcaggacaagcggctgcactgctacgcctcctggcgcaacagctctggcaccatcgagctcgtgaagaagggctgctggctagatgacaagcgttgctacgataggcaggagtgtgtggccactgaggagaacccccaggtgtacttctgctgctgtgaaggcaacttctgcaacgagcgcttcactcatttgccagaggctgggggcccggaagtcacgtacgagccacccccgacagcccccaccggtggtggaactcacacatgcccaccgtgcccagcacctgaactcctggggggaccgtcagtcttcctcttccccccaaaacccaaggacaccctcatgatctcccggacccctgaggtcacatgcgtggtggtggacgtgagccacgaagaccctgaggtcaagttcaactggtacgtggacggcgtggaggtgcataatgccaagacaaagccgcgggaggagcagtacaacagcacgtaccgtgtggtcagcgtcctcaccgtcctgcaccaggactggctgaatggcaaggagtacaagtgcaaggtctccaacaaagccctcccagcccccatcgagaaaaccatctccaaagccaaagggcagccccgagaaccacaggtgtacaccctgcccccatcccgggaggagatgaccaagaaccaggtcagcctgacctgcctggtcaaaggcttctatcccagcgacatcgccgtggagtgggagagcaatgggcagccggagaacaactacaagaccacgcctcccgtgctggactccgacggctccttcttcctctatagcaagctcaccgtggacaagagcaggtggcagcaggggaacgtcttctcatgctccgtgatgcatgaggctctgcacaaccactacacgcagaagagcctctccctgtctccgggtaaatga

SEQ ID NO: 332 - protein, 343 aa, Artificial Sequence
  Description of Artificial Sequence: Synthetic polypeptide
GRGEAETRECIYYNANWELERTNQSGLERCEGEQDKRLHCYASWRNSSGTIELVKKGCWLDDKRCYDRQECVATEENPQVYFCCCEGNFCNERFTHLPEAGGPEVTYEPPPTAPTGGGTHTCPPCPAPELLGGPSVFLFPPKPKDTLMISRTPEVTCVVVDVSHEDPEVKFNWYVDGVEVHNAKTKPREEQYNSTYRVVSVLTVLHQDWLNGKEYKCKVSNKALPAPIEKTISKAKGQPREPQVYTLPPSREEMTKNQVSLTCLVKGFYPSDIAVEWESNGQPENNYKTTPPVLDSDGSFFLYSKLTVDKSRWQQGNVFSCSVMHEALHNHYTQKSLSLSPGK

SEQ ID NO: 333 - protein, 368 aa, Artificial Sequence
  Description of Artificial Sequence: Synthetic polypeptide
MDAMKRGLCCVLLLCGAVFVSPGASGRGEAETRECIYYNANWELERTNQSGLERCEGEQDKRLHCYASWRNSSGTIELVKKGCWLDDTRCYDRQECVATEENPQVYFCCCEGNFCNERFTHLPEAGGPEVTYEPPPTAPTGGGTHTCPPCPAPELLGGPSVFLFPPKPKDTLMISRTPEVTCVVVDVSHEDPEVKFNWYVDGVEVHNAKTKPREEQYNSTYRVVSVLTVLHQDWLNGKEYKCKVSNKALPAPIEKTISKAKGQPREPQVYTLPPSREEMTKNQVSLTCLVKGFYPSDIAVEWESNGQPENNYKTTPPVLDSDGSFFLYSKLTVDKSRWQQGNVFSCSVMHEALHNHYTQKSLSLSPGK

SEQ ID NO: 334 - DNA, 1107 bp, Artificial Sequence
  Description of Artificial Sequence: Synthetic polynucleotide
atggatgcaatgaagagagggctctgctgtgtgctgctgctgtgtggagcagtcttcgtttcgcccggcgcctctgggcgtggggaggctgagacacgggagtgcatctactacaacgccaactgggagctggagcgcaccaaccagagcggcctggagcgctgcgaaggcgagcaggacaagcggctgcactgctacgcctcctggcgcaacagctctggcaccatcgagctcgtgaagaagggctgctggctagatgacacccgttgctacgataggcaggagtgtgtggccactgaggagaacccccaggtgtacttctgctgctgtgaaggcaacttctgcaacgagcgcttcactcatttgccagaggctgggggcccggaagtcacgtacgagccacccccgacagcccccaccggtggtggaactcacacatgcccaccgtgcccagcacctgaactcctggggggaccgtcagtcttcctcttccccccaaaacccaaggacaccctcatgatctcccggacccctgaggtcacatgcgtggtggtggacgtgagccacgaagaccctgaggtcaagttcaactggtacgtggacggcgtggaggtgcataatgccaagacaaagccgcgggaggagcagtacaacagcacgtaccgtgtggtcagcgtcctcaccgtcctgcaccaggactggctgaatggcaaggagtacaagtgcaaggtctccaacaaagccctcccagcccccatcgagaaaaccatctccaaagccaaagggcagccccgagaaccacaggtgtacaccctgcccccatcccgggaggagatgaccaagaaccaggtcagcctgacctgcctggtcaaaggcttctatcccagcgacatcgccgtggagtgggagagcaatgggcagccggagaacaactacaagaccacgcctcccgtgctggactccgacggctccttcttcctctatagcaagctcaccgtggacaagagcaggtggcagcaggggaacgtcttctcatgctccgtgatgcatgaggctctgcacaaccactacacgcagaagagcctctccctgtctccgggtaaatga

SEQ ID NO: 335 - protein, 343 aa, Artificial Sequence
  Description of Artificial Sequence: Synthetic polypeptide
GRGEAETRECIYYNANWELERTNQSGLERCEGEQDKRLHCYASWRNSSGTIELVKKGCWLDDTRCYDRQECVATEENPQVYFCCCEGNFCNERFTHLPEAGGPEVTYEPPPTAPTGGGTHTCPPCPAPELLGGPSVFLFPPKPKDTLMISRTPEVTCVVVDVSHEDPEVKFNWYVDGVEVHNAKTKPREEQYNSTYRVVSVLTVLHQDWLNGKEYKCKVSNKALPAPIEKTISKAKGQPREPQVYTLPPSREEMTKNQVSLTCLVKGFYPSDIAVEWESNGQPENNYKTTPPVLDSDGSFFLYSKLTVDKSRWQQGNVFSCSVMHEALHNHYTQKSLSLSPGK

SEQ ID NO: 336 - protein, 368 aa, Artificial Sequence
  Description of Artificial Sequence: Synthetic polypeptide
MDAMKRGLCCVLLLCGAVFVSPGASGRGEAETRECIYYNANWELERTNQSGLERCEGEQDKRLHCYASWRNSSGTIELVKKGCWLDDTNCYDRQECVATEENPQVYFCCCEGNFCNERFTHLPEAGGPEVTYEPPPTAPTGGGTHTCPPCPAPELLGGPSVFLFPPKPKDTLMISRTPEVTCVVVDVSHEDPEVKFNWYVDGVEVHNAKTKPREEQYNSTYRVVSVLTVLHQDWLNGKEYKCKVSNKALPAPIEKTISKAKGQPREPQVYTLPPSREEMTKNQVSLTCLVKGFYPSDIAVEWESNGQPENNYKTTPPVLDSDGSFFLYSKLTVDKSRWQQGNVFSCSVMHEALHNHYTQKSLSLSPGK

SEQ ID NO: 337 - DNA, 1107 bp, Artificial Sequence
  Description of Artificial Sequence: Synthetic polynucleotide
atggatgcaatgaagagagggctctgctgtgtgctgctgctgtgtggagcagtcttcgtttcgcccggcgcctctgggcgtggggaggctgagacacgggagtgcatctactacaacgccaactgggagctggagcgcaccaaccagagcggcctggagcgctgcgaaggcgagcaggacaagcggctgcactgctacgcctcctggcgcaacagctctggcaccatcgagctcgtgaagaagggctgctggctagatgacaccaactgctacgataggcaggagtgtgtggccactgaggagaacccccaggtgtacttctgctgctgtgaaggcaacttctgcaacgagcgcttcactcatttgccagaggctgggggcccggaagtcacgtacgagccacccccgacagcccccaccggtggtggaactcacacatgcccaccgtgcccagcacctgaactcctggggggaccgtcagtcttcctcttccccccaaaacccaaggacaccctcatgatctcccggacccctgaggtcacatgcgtggtggtggacgtgagccacgaagaccctgaggtcaagttcaactggtacgtggacggcgtggaggtgcataatgccaagacaaagccgcgggaggagcagtacaacagcacgtaccgtgtggtcagcgtcctcaccgtcctgcaccaggactggctgaatggcaaggagtacaagtgcaaggtctccaacaaagccctcccagcccccatcgagaaaaccatctccaaagccaaagggcagccccgagaaccacaggtgtacaccctgcccccatcccgggaggagatgaccaagaaccaggtcagcctgacctgcctggtcaaaggcttctatcccagcgacatcgccgtggagtgggagagcaatgggcagccggagaacaactacaagaccacgcctcccgtgctggactccgacggctccttcttcctctatagcaagctcaccgtggacaagagcaggtggcagcaggggaacgtcttctcatgctccgtgatgcatgaggctctgcacaaccactacacgcagaagagcctctccctgtctccgggtaaatga

SEQ ID NO: 338 - protein, 343 aa, Artificial Sequence
  Description of Artificial Sequence: Synthetic polypeptide
GRGEAETRECIYYNANWELERTNQSGLERCEGEQDKRLHCYASWRNSSGTIELVKKGCWLDDTNCYDRQECVATEENPQVYFCCCEGNFCNERFTHLPEAGGPEVTYEPPPTAPTGGGTHTCPPCPAPELLGGPSVFLFPPKPKDTLMISRTPEVTCVVVDVSHEDPEVKFNWYVDGVEVHNAKTKPREEQYNSTYRVVSVLTVLHQDWLNGKEYKCKVSNKALPAPIEKTISKAKGQPREPQVYTLPPSREEMTKNQVSLTCLVKGFYPSDIAVEWESNGQPENNYKTTPPVLDSDGSFFLYSKLTVDKSRWQQGNVFSCSVMHEALHNHYTQKSLSLSPGK

SEQ ID NO: 339 - protein, 368 aa, Artificial Sequence
  Description of Artificial Sequence: Synthetic polypeptide
MDAMKRGLCCVLLLCGAVFVSPGASGRGEAETRECIYYNANWELERTNQSGLERCEGEQDKRLHCYASWRNSSGTIELVKKGCWHDDINCYDRQECVATEENPQVYFCCCEGNFCNERFTHLPEAGGPEVTYEPPPTAPTGGGTHTCPPCPAPELLGGPSVFLFPPKPKDTLMISRTPEVTCVVVDVSHEDPEVKFNWYVDGVEVHNAKTKPREEQYNSTYRVVSVLTVLHQDWLNGKEYKCKVSNKALPAPIEKTISKAKGQPREPQVYTLPPSREEMTKNQVSLTCLVKGFYPSDIAVEWESNGQPENNYKTTPPVLDSDGSFFLYSKLTVDKSRWQQGNVFSCSVMHEALHNHYTQKSLSLSPGK

SEQ ID NO: 340 - DNA, 1107 bp, Artificial Sequence
  Description of Artificial Sequence: Synthetic polynucleotide
atggatgcaatgaagagagggctctgctgtgtgctgctgctgtgtggagcagtcttcgtttcgcccggcgcctctgggcgtggggaggctgagacacgggagtgcatctactacaacgccaactgggagctggagcgcaccaaccagagcggcctggagcgctgcgaaggcgagcaggacaagcggctgcactgctacgcctcctggcgcaacagctctggcaccatcgagctcgtgaagaagggctgctggcacgatgacatcaactgctacgataggcaggagtgtgtggccactgaggagaacccccaggtgtacttctgctgctgtgaaggcaacttctgcaacgagcgcttcactcatttgccagaggctgggggcccggaagtcacgtacgagccacccccgacagcccccaccggtggtggaactcacacatgcccaccgtgcccagcacctgaactcctggggggaccgtcagtcttcctcttccccccaaaacccaaggacaccctcatgatctcccggacccctgaggtcacatgcgtggtggtggacgtgagccacgaagaccctgaggtcaagttcaactggtacgtggacggcgtggaggtgcataatgccaagacaaagccgcgggaggagcagtacaacagcacgtaccgtgtggtcagcgtcctcaccgtcctgcaccaggactggctgaatggcaaggagtacaagtgcaaggtctccaacaaagccctcccagcccccatcgagaaaaccatctccaaagccaaagggcagccccgagaaccacaggtgtacaccctgcccccatcccgggaggagatgaccaagaaccaggtcagcctgacctgcctggtcaaaggcttctatcccagcgacatcgccgtggagtgggagagcaatgggcagccggagaacaactacaagaccacgcctcccgtgctggactccgacggctccttcttcctctatagcaagctcaccgtggacaagagcaggtggcagcaggggaacgtcttctcatgctccgtgatgcatgaggctctgcacaaccactacacgcagaagagcctctccctgtctccgggtaaatga

SEQ ID NO: 341 - protein, 343 aa, Artificial Sequence
  Description of Artificial Sequence: Synthetic polypeptide
GRGEAETRECIYYNANWELERTNQSGLERCEGEQDKRLHCYASWRNSSGTIELVKKGCWHDDINCYDRQECVATEENPQVYFCCCEGNFCNERFTHLPEAGGPEVTYEPPPTAPTGGGTHTCPPCPAPELLGGPSVFLFPPKPKDTLMISRTPEVTCVVVDVSHEDPEVKFNWYVDGVEVHNAKTKPREEQYNSTYRVVSVLTVLHQDWLNGKEYKCKVSNKALPAPIEKTISKAKGQPREPQVYTLPPSREEMTKNQVSLTCLVKGFYPSDIAVEWESNGQPENNYKTTPPVLDSDGSFFLYSKLTVDKSRWQQGNVFSCSVMHEALHNHYTQKSLSLSPGK

SEQ ID NO: 342 - protein, 368 aa, Artificial Sequence
  Description of Artificial Sequence: Synthetic polypeptide
MDAMKRGLCCVLLLCGAVFVSPGASGRGEAETRECIYYNANWELERTNQSGLERCEGEQDKRLHCYASWRNSSGTIELVKKGCWHDDFNCYDRQECVATEENPQVYFCCCEGNFCNERFTHLPEAGGPEVTYEPPPTAPTGGGTHTCPPCPAPELLGGPSVFLFPPKPKDTLMISRTPEVTCVVVDVSHEDPEVKFNWYVDGVEVHNAKTKPREEQYNSTYRVVSVLTVLHQDWLNGKEYKCKVSNKALPAPIEKTISKAKGQPREPQVYTLPPSREEMTKNQVSLTCLVKGFYPSDIAVEWESNGQPENNYKTTPPVLDSDGSFFLYSKLTVDKSRWQQGNVFSCSVMHEALHNHYTQKSLSLSPGK

SEQ ID NO: 343 - DNA, 1107 bp, Artificial Sequence
  Description of Artificial Sequence: Synthetic polynucleotide
atggatgcaatgaagagagggctctgctgtgtgctgctgctgtgtggagcagtcttcgtttcgcccggcgcctctgggcgtggggaggctgagacacgggagtgcatctactacaacgccaactgggagctggagcgcaccaaccagagcggcctggagcgctgcgaaggcgagcaggacaagcggctgcactgctacgcctcctggcgcaacagctctggcaccatcgagctcgtgaagaagggctgctggcacgatgacttcaactgctacgataggcaggagtgtgtggccactgaggagaacccccaggtgtacttctgctgctgtgaaggcaacttctgcaacgagcgcttcactcatttgccagaggctgggggcccggaagtcacgtacgagccacccccgacagcccccaccggtggtggaactcacacatgcccaccgtgcccagcacctgaactcctggggggaccgtcagtcttcctcttccccccaaaacccaaggacaccctcatgatctcccggacccctgaggtcacatgcgtggtggtggacgtgagccacgaagaccctgaggtcaagttcaactggtacgtggacggcgtggaggtgcataatgccaagacaaagccgcgggaggagcagtacaacagcacgtaccgtgtggtcagcgtcctcaccgtcctgcaccaggactggctgaatggcaaggagtacaagtgcaaggtctccaacaaagccctcccagcccccatcgagaaaaccatctccaaagccaaagggcagccccgagaaccacaggtgtacaccctgcccccatcccgggaggagatgaccaagaaccaggtcagcctgacctgcctggtcaaaggcttctatcccagcgacatcgccgtggagtgggagagcaatgggcagccggagaacaactacaagaccacgcctcccgtgctggactccgacggctccttcttcctctatagcaagctcaccgtggacaagagcaggtggcagcaggggaacgtcttctcatgctccgtgatgcatgaggctctgcacaaccactacacgcagaagagcctctccctgtctccgggtaaatga

SEQ ID NO: 344 - protein, 343 aa, Artificial Sequence
  Description of Artificial Sequence: Synthetic polypeptide
GRGEAETRECIYYNANWELERTNQSGLERCEGEQDKRLHCYASWRNSSGTIELVKKGCWHDDFNCYDRQECVATEENPQVYFCCCEGNFCNERFTHLPEAGGPEVTYEPPPTAPTGGGTHTCPPCPAPELLGGPSVFLFPPKPKDTLMISRTPEVTCVVVDVSHEDPEVKFNWYVDGVEVHNAKTKPREEQYNSTYRVVSVLTVLHQDWLNGKEYKCKVSNKALPAPIEKTISKAKGQPREPQVYTLPPSREEMTKNQVSLTCLVKGFYPSDIAVEWESNGQPENNYKTTPPVLDSDGSFFLYSKLTVDKSRWQQGNVFSCSVMHEALHNHYTQKSLSLSPGK

SEQ ID NO: 345 - protein, 368 aa, Artificial Sequence
  Description of Artificial Sequence: Synthetic polypeptide
MDAMKRGLCCVLLLCGAVFVSPGASGRGEAETRECIYYNANWELERTNQSGLERCEGEQDKRLHCYASWRNSSGTIELVKKGCWHDDKNCYDRQECVATEENPQVYFCCCEGNFCNERFTHLPEAGGPEVTYEPPPTAPTGGGTHTCPPCPAPELLGGPSVFLFPPKPKDTLMISRTPEVTCVVVDVSHEDPEVKFNWYVDGVEVHNAKTKPREEQYNSTYRVVSVLTVLHQDWLNGKEYKCKVSNKALPAPIEKTISKAKGQPREPQVYTLPPSREEMTKNQVSLTCLVKGFYPSDIAVEWESNGQPENNYKTTPPVLDSDGSFFLYSKLTVDKSRWQQGNVFSCSVMHEALHNHYTQKSLSLSPGK

SEQ ID NO: 346 - DNA, 1107 bp, Artificial Sequence
  Description of Artificial Sequence: Synthetic polynucleotide
atggatgcaatgaagagagggctctgctgtgtgctgctgctgtgtggagcagtcttcgtttcgcccggcgcctctgggcgtggggaggctgagacacgggagtgcatctactacaacgccaactgggagctggagcgcaccaaccagagcggcctggagcgctgcgaaggcgagcaggacaagcggctgcactgctacgcctcctggcgcaacagctctggcaccatcgagctcgtgaagaagggctgctggcacgatgacaagaactgctacgataggcaggagtgtgtggccactgaggagaacccccaggtgtacttctgctgctgtgaaggcaacttctgcaacgagcgcttcactcatttgccagaggctgggggcccggaagtcacgtacgagccacccccgacagcccccaccggtggtggaactcacacatgcccaccgtgcccagcacctgaactcctggggggaccgtcagtcttcctcttccccccaaaacccaaggacaccctcatgatctcccggacccctgaggtcacatgcgtggtggtggacgtgagccacgaagaccctgaggtcaagttcaactggtacgtggacggcgtggaggtgcataatgccaagacaaagccgcgggaggagcagtacaacagcacgtaccgtgtggtcagcgtcctcaccgtcctgcaccaggactggctgaatggcaaggagtacaagtgcaaggtctccaacaaagccctcccagcccccatcgagaaaaccatctccaaagccaaagggcagccccgagaaccacaggtgtacaccctgcccccatcccgggaggagatgaccaagaaccaggtcagcctgacctgcctggtcaaaggcttctatcccagcgacatcgccgtggagtgggagagcaatgggcagccggagaacaactacaagaccacgcctcccgtgctggactccgacggctccttcttcctctatagcaagctcaccgtggacaagagcaggtggcagcaggggaacgtcttctcatgctccgtgatgcatgaggctctgcacaaccactacacgcagaagagcctctccctgtctccgggtaaatga

SEQ ID NO: 347 - protein, 343 aa, Artificial Sequence
  Description of Artificial Sequence: Synthetic polypeptide
GRGEAETRECIYYNANWELERTNQSGLERCEGEQDKRLHCYASWRNSSGTIELVKKGCWHDDKNCYDRQECVATEENPQVYFCCCEGNFCNERFTHLPEAGGPEVTYEPPPTAPTGGGTHTCPPCPAPELLGGPSVFLFPPKPKDTLMISRTPEVTCVVVDVSHEDPEVKFNWYVDGVEVHNAKTKPREEQYNSTYRVVSVLTVLHQDWLNGKEYKCKVSNKALPAPIEKTISKAKGQPREPQVYTLPPSREEMTKNQVSLTCLVKGFYPSDIAVEWESNGQPENNYKTTPPVLDSDGSFFLYSKLTVDKSRWQQGNVFSCSVMHEALHNHYTQKSLSLSPGK

SEQ ID NO: 348 - protein, 368 aa, Artificial Sequence
  Description of Artificial Sequence: Synthetic polypeptide
MDAMKRGLCCVLLLCGAVFVSPGASGRGEAETRECIYYNANWELERTNQSGLERCLGEQDKRLHCYASWRNSSGTIELVKKGCWLDDFNCYDRQECVATEENPQVYFCCCEGNFCNERFTHLPEAGGPEVTYEPPPTAPTGGGTHTCPPCPAPELLGGPSVFLFPPKPKDTLMISRTPEVTCVVVDVSHEDPEVKFNWYVDGVEVHNAKTKPREEQYNSTYRVVSVLTVLHQDWLNGKEYKCKVSNKALPAPIEKTISKAKGQPREPQVYTLPPSREEMTKNQVSLTCLVKGFYPSDIAVEWESNGQPENNYKTTPPVLDSDGSFFLYSKLTVDKSRWQQGNVFSCSVMHEALHNHYTQKSLSLSPGK

SEQ ID NO: 349 - DNA, 1107 bp, Artificial Sequence
  Description of Artificial Sequence: Synthetic polynucleotide
atggatgcgatgaaacgcggcctgtgctgcgtgctgctgctgtgcggcgcggtgtttgtgagcccgggcgccagcggccgcggcgaagcggaaacccgcgaatgcatttattataacgcgaactgggaactggaacgcaccaaccagagcggcctggaacgctgcctgggcgaacaggataaacgcctgcattgctatgcgagctggcgcaacagcagcggcaccattgaactggtgaaaaaaggctgctggctggatgattttaactgctatgatcgccaggaatgcgtggcgaccgaagaaaacccgcaggtgtatttttgctgctgcgaaggcaacttttgcaacgaacgctttacccatctgccggaagcgggcggcccggaagtgacctatgaaccgccgccgaccgcgccgaccggtggtggaactcacacatgcccaccgtgcccagcacctgaactcctggggggaccgtcagtcttcctcttccccccaaaacccaaggacaccctcatgatctcccggacccctgaggtcacatgcgtggtggtggacgtgagccacgaagaccctgaggtcaagttcaactggtacgtggacggcgtggaggtgcataatgccaagacaaagccgcgggaggagcagtacaacagcacgtaccgtgtggtcagcgtcctcaccgtcctgcaccaggactggctgaatggcaaggagtacaagtgcaaggtctccaacaaagccctcccagcccccatcgagaaaaccatctccaaagccaaagggcagccccgagaaccacaggtgtacaccctgcccccatcccgggaggagatgaccaagaaccaggtcagcctgacctgcctggtcaaaggcttctatcccagcgacatcgccgtggagtgggagagcaatgggcagccggagaacaactacaagaccacgcctcccgtgctggactccgacggctccttcttcctctatagcaagctcaccgtggacaagagcaggtggcagcaggggaacgtcttctcatgctccgtgatgcatgaggctctgcacaaccactacacgcagaagagcctctccctgtctccgggtaaatga

SEQ ID NO: 350 - protein, 343 aa, Artificial Sequence
  Description of Artificial Sequence: Synthetic polypeptide
GRGEAETRECIYYNANWELERTNQSGLERCLGEQDKRLHCYASWRNSSGTIELVKKGCWLDDFNCYDRQECVATEENPQVYFCCCEGNFCNERFTHLPEAGGPEVTYEPPPTAPTGGGTHTCPPCPAPELLGGPSVFLFPPKPKDTLMISRTPEVTCVVVDVSHEDPEVKFNWYVDGVEVHNAKTKPREEQYNSTYRVVSVLTVLHQDWLNGKEYKCKVSNKALPAPIEKTISKAKGQPREPQVYTLPPSREEMTKNQVSLTCLVKGFYPSDIAVEWESNGQPENNYKTTPPVLDSDGSFFLYSKLTVDKSRWQQGNVFSCSVMHEALHNHYTQKSLSLSPGK

SEQ ID NO: 351 - protein, 368 aa, Artificial Sequence
  Description of Artificial Sequence: Synthetic polypeptide
MDAMKRGLCCVLLLCGAVFVSPGASGRGEAETRECIYYNANWENERTNQSGLERCEGEQDKRLHCYASWRNSSGTIELVKKGCWRDDFNCYDRQECVATEENPQVYFCCCEGNFCNERFTHLPEAGGPEVTYEPPPTAPTGGGTHTCPPCPAPELLGGPSVFLFPPKPKDTLMISRTPEVTCVVVDVSHEDPEVKFNWYVDGVEVHNAKTKPREEQYNSTYRVVSVLTVLHQDWLNGKEYKCKVSNKALPAPIEKTISKAKGQPREPQVYTLPPSREEMTKNQVSLTCLVKGFYPSDIAVEWESNGQPENNYKTTPPVLDSDGSFFLYSKLTVDKSRWQQGNVFSCSVMHEALHNHYTQKSLSLSPGK

SEQ ID NO: 352 - DNA, 1107 bp, Artificial Sequence
  Description of Artificial Sequence: Synthetic polynucleotide
atggatgcaatgaagagagggctctgctgtgtgctgctgctgtgtggagcagtcttcgtttcgcccggcgcctctgggcgtggggaggctgagacacgggagtgcatctactacaacgccaactgggagaacgagcgcaccaaccagagcggcctggagcgctgcgaaggcgagcaggacaagcggctgcactgctacgcctcctggcgcaacagctctggcaccatcgagctcgtgaagaagggctgctggcgcgatgacttcaactgctacgataggcaggagtgtgtggccactgaggagaacccccaggtgtacttctgctgctgtgaaggcaacttctgcaacgagcgcttcactcatttgccagaggctgggggcccggaagtcacgtacgagccacccccgacagcccccaccggtggtggaactcacacatgcccaccgtgcccagcacctgaactcctggggggaccgtcagtcttcctcttccccccaaaacccaaggacaccctcatgatctcccggacccctgaggtcacatgcgtggtggtggacgtgagccacgaagaccctgaggtcaagttcaactggtacgtggacggcgtggaggtgcataatgccaagacaaagccgcgggaggagcagtacaacagcacgtaccgtgtggtcagcgtcctcaccgtcctgcaccaggactggctgaatggcaaggagtacaagtgcaaggtctccaacaaagccctcccagcccccatcgagaaaaccatctccaaagccaaagggcagccccgagaaccacaggtgtacaccctgcccccatcccgggaggagatgaccaagaaccaggtcagcctgacctgcctggtcaaaggcttctatcccagcgacatcgccgtggagtgggagagcaatgggcagccggagaacaactacaagaccacgcctcccgtgctggactccgacggctccttcttcctctatagcaagctcaccgtggacaagagcaggtggcagcaggggaacgtcttctcatgctccgtgatgcatgaggctctgcacaaccactacacgcagaagagcctctccctgtctccgggtaaatga

SEQ ID NO: 353 - protein, 343 aa, Artificial Sequence
  Description of Artificial Sequence: Synthetic polypeptide
GRGEAETRECIYYNANWENERTNQSGLERCEGEQDKRLHCYASWRNSSGTIELVKKGCWRDDFNCYDRQECVATEENPQVYFCCCEGNFCNERFTHLPEAGGPEVTYEPPPTAPTGGGTHTCPPCPAPELLGGPSVFLFPPKPKDTLMISRTPEVTCVVVDVSHEDPEVKFNWYVDGVEVHNAKTKPREEQYNSTYRVVSVLTVLHQDWLNGKEYKCKVSNKALPAPIEKTISKAKGQPREPQVYTLPPSREEMTKNQVSLTCLVKGFYPSDIAVEWESNGQPENNYKTTPPVLDSDGSFFLYSKLTVDKSRWQQGNVFSCSVMHEALHNHYTQKSLSLSPGK

SEQ ID NO: 354 - protein, 368 aa, Artificial Sequence
  Description of Artificial Sequence: Synthetic polypeptide
MDAMKRGLCCVLLLCGAVFVSPGASGRGEAETRECIYYNANWELERTNQSGLERCEGEQDKRLHCYASWRNSSGTIELVKKGCWLDDFNCYDRQECVATEENPQGYFCCCEGNFCNERFTHLPEAGGPEVTYEPPPTAPTGGGTHTCPPCPAPELLGGPSVFLFPPKPKDTLMISRTPEVTCVVVDVSHEDPEVKFNWYVDGVEVHNAKTKPREEQYNSTYRVVSVLTVLHQDWLNGKEYKCKVSNKALPAPIEKTISKAKGQPREPQVYTLPPSREEMTKNQVSLTCLVKGFYPSDIAVEWESNGQPENNYKTTPPVLDSDGSFFLYSKLTVDKSRWQQGNVFSCSVMHEALHNHYTQKSLSLSPGK

SEQ ID NO: 355 - DNA, 1107 bp, Artificial Sequence
  Description of Artificial Sequence: Synthetic polynucleotide
atggatgcgatgaaacgcggcctgtgctgcgtgctgctgctgtgcggcgcggtgtttgtgagcccgggcgccagcggccgcggcgaagcggaaacccgcgaatgcatttattataacgcgaactgggaactggaacgcaccaaccagagcggcctggaacgctgcgaaggcgaacaggataaacgcctgcattgctatgcgagctggcgcaacagcagcggcaccattgaactggtgaaaaaaggctgctggctggatgattttaactgctatgatcgccaggaatgcgtggcgaccgaagaaaacccgcagggctatttttgctgctgcgaaggcaacttttgcaacgaacgctttacccatctgccggaagcgggcggcccggaagtgacctatgaaccgccgccgaccgcgccgaccggtggtggaactcacacatgcccaccgtgcccagcacctgaactcctggggggaccgtcagtcttcctcttccccccaaaacccaaggacaccctcatgatctcccggacccctgaggtcacatgcgtggtggtggacgtgagccacgaagaccctgaggtcaagttcaactggtacgtggacggcgtggaggtgcataatgccaagacaaagccgcgggaggagcagtacaacagcacgtaccgtgtggtcagcgtcctcaccgtcctgcaccaggactggctgaatggcaaggagtacaagtgcaaggtctccaacaaagccctcccagcccccatcgagaaaaccatctccaaagccaaagggcagccccgagaaccacaggtgtacaccctgcccccatcccgggaggagatgaccaagaaccaggtcagcctgacctgcctggtcaaaggcttctatcccagcgacatcgccgtggagtgggagagcaatgggcagccggagaacaactacaagaccacgcctcccgtgctggactccgacggctccttcttcctctatagcaagctcaccgtggacaagagcaggtggcagcaggggaacgtcttctcatgctccgtgatgcatgaggctctgcacaaccactacacgcagaagagcctctccctgtctccgggtaaatga

SEQ ID NO: 356 - protein, 343 aa, Artificial Sequence
  Description of Artificial Sequence: Synthetic polypeptide
GRGEAETRECIYYNANWELERTNQSGLERCEGEQDKRLHCYASWRNSSGTIELVKKGCWLDDFNCYDRQECVATEENPQGYFCCCEGNFCNERFTHLPEAGGPEVTYEPPPTAPTGGGTHTCPPCPAPELLGGPSVFLFPPKPKDTLMISRTPEVTCVVVDVSHEDPEVKFNWYVDGVEVHNAKTKPREEQYNSTYRVVSVLTVLHQDWLNGKEYKCKVSNKALPAPIEKTISKAKGQPREPQVYTLPPSREEMTKNQVSLTCLVKGFYPSDIAVEWESNGQPENNYKTTPPVLDSDGSFFLYSKLTVDKSRWQQGNVFSCSVMHEALHNHYTQKSLSLSPGK

SEQ ID NO: 357 - skipped

SEQ ID NO: 358 - protein, 150 aa, Rattus sp.
MTAPWAALALLWGSLCAGSGRGEAETRECIYYNANWELERTNQSGLERCEGEQDKRLHCYASWPNSSGTIELVKKGCWLDDFNCYDRQECVATEENPQVYFCCCEGNFCNERFTHLPEPGGPEVTYEPPPTAPTLLTVLAYSLLPIGGLS

SEQ ID NO: 359 - protein, 150 aa, Sus sp.
MTAPWAALALLWGSLCVGSGRGEAETRECIYYNANWELERTNQSGLERCEGEQDKRLHCYASWRNSSGTIELVKKGCWLDDFNCYDRQECVATEENPQVYFCCCEGNFCNERFTHLPEAGGPEVTYEPPPTAPTLLTVLAYSLLPIGGLS

SEQ ID NO: 360 - protein, 150 aa, Mus sp.
MTAPWAALALLWGSLCAGSGRGEAETRECIYYNANWELERTNQSGLERCEGEQDKRLHCYASWRNSSGTIELVKKGCWLDDFNCYDRQECVATEENPQVYFCCCEGNFCNERFTHLPEPGGPEVTYEPPPTAPTLLTVLAYSLLPIGGLS

SEQ ID NO: 361 - protein, 150 aa, Homo sapiens
MTAPWVALALLWGSLCAGSGRGEAETRECIYYNANWELERTNQSGLERCEGEQDKRLHCYASWRNSSGTIELVKKGCWLDDFNCYDRQECVATEENPQVYFCCCEGNFCNERFTHLPEAGGPEVTYEPPPTAPTLLTVLAYSLLPIGGLS

SEQ ID NO: 362 - protein, 150 aa, Bos taurus
MTAPWAALALLWGSLCAGSGRGEAETRECIYYNANWELERTNQSGLERCEGERDKRLHCYASWRNSSGTIELVKKGCWLDDFNCYDRQECVATEENPQVYFCCCEGNFCNERFTHLPEAGGPEVTYEPPPTAPTLLTVLAYSLLPVGGLS

SEQ ID NO: 363 - protein, 150 aa, Xenopus sp.
MGASVALTFLLLLATFRAGSGHDEVETRECIYYNANWELEKTNQSGVERLVEGKKDKRLHCYASWRNNSGFIELVKKGCWLDDFNCYDRQECIAKEENPQVFFCCCEGNYCNKKFTHLPEVETFDPKPQPSASVLNILIYSLLPIVGLSM

SEQ ID NO: 364 - protein, 150 aa, Homo sapiens
MGAAAKLAFAVFLISCSSGAILGRSETQECLFFNANWEKDRTNQTGVEPCYGDKDKRRHCFATWKNISGSIEIVKQGCWLDDINCYDRTDCVEKKDSPEVYFCCCEGNMCNEKFSYFPEMEVTQPTSNPVTPKPPYYNILLYSLVPLMLI

SEQ ID NO: 365 - protein, 154 aa, Artificial Sequence
  Description of Artificial Sequence: Synthetic polypeptide
  MOD_RES (8)..(8): T, A, or absent
  MOD_RES (121)..(121): P, A, V, or M
MTAPWAAXLALLWGSLCAGSGRGEAETRECRYYNANWELERTNQSGLERLCEGEQDKRLHCYASWRNSSGTIELVKKGCWLDDFNCYDRQECVATEENPQVYFCCCEGNFCNERFTHLPEXGGPEVTYEPKPPTAPTLLTVLAYSLLPIGGLSM

SEQ ID NO: 366 - protein, 368 aa, Artificial Sequence
  Description of Artificial Sequence: Synthetic polypeptide
MDAMKRGLCCVLLLCGAVFVSPGASGRGEAETRECIYYNAEWELERTNQSGLERCEGEQDKRLHCYASWRNSSGTIELVKKGCWLDDFNCYDRQECVATEENPQVYFCCCEGNFCNERFTHLPEAGGPEVTYEPPPTAPTGGGTHTCPPCPAPELLGGPSVFLFPPKPKDTLMISRTPEVTCVVVDVSHEDPEVKFNWYVDGVEVHNAKTKPREEQYNSTYRVVSVLTVLHQDWLNGKEYKCKVSNKALPAPIEKTISKAKGQPREPQVYTLPPSREEMTKNQVSLTCLVKGFYPSDIAVEWESNGQPENNYKTTPPVLDSDGSFFLYSKLTVDKSRWQQGNVFSCSVMHEALHNHYTQKSLSLSPGK

SEQ ID NO: 367 - DNA, 1104 bp, Artificial Sequence
  Description of Artificial Sequence: Synthetic polynucleotide
atggatgcaatgaagagagggctctgctgtgtgctgctgctgtgtggagcagtcttcgtttcgcccggcgcctctgggcgtggggaggctgagacacgggagtgcatctactacaacgccgagtgggagctggagcgcaccaaccagagcggcctggagcgctgcgaaggcgagcaggacaagcggctgcactgctacgcctcctggcgcaacagctctggcaccatcgagctcgtgaagaagggctgctggctagatgacttcaactgctacgataggcaggagtgtgtggccactgaggagaacccccaggtgtacttctgctgctgtgaaggcaacttctgcaacgagcgcttcactcatttgccagaggctgggggcccggaagtcacgtacgagccacccccgacagcccccaccggtggtggaactcacacatgcccaccgtgcccagcacctgaactcctggggggaccgtcagtcttcctcttccccccaaaacccaaggacaccctcatgatctcccggacccctgaggtcacatgcgtggtggtggacgtgagccacgaagaccctgaggtcaagttcaactggtacgtggacggcgtggaggtgcataatgccaagacaaagccgcgggaggagcagtacaacagcacgtaccgtgtggtcagcgtcctcaccgtcctgcaccaggactggctgaatggcaaggagtacaagtgcaaggtctccaacaaagccctcccagcccccatcgagaaaaccatctccaaagccaaagggcagccccgagaaccacaggtgtacaccctgcccccatcccgggaggagatgaccaagaaccaggtcagcctgacctgcctggtcaaaggcttctatcccagcgacatcgccgtggagtgggagagcaatgggcagccggagaacaactacaagaccacgcctcccgtgctggactccgacggctccttcttcctctatagcaagctcaccgtggacaagagcaggtggcagcaggggaacgtcttctcatgctccgtgatgcatgaggctctgcacaaccactacacgcagaagagcctctccctgtctccgggtaaa

SEQ ID NO: 368 - protein, 343 aa, Artificial Sequence
  Description of Artificial Sequence: Synthetic polypeptide
GRGEAETRECIYYNAEWELERTNQSGLERCEGEQDKRLHCYASWRNSSGTIELVKKGCWLDDFNCYDRQECVATEENPQVYFCCCEGNFCNERFTHLPEAGGPEVTYEPPPTAPTGGGTHTCPPCPAPELLGGPSVFLFPPKPKDTLMISRTPEVTCVVVDVSHEDPEVKFNWYVDGVEVHNAKTKPREEQYNSTYRVVSVLTVLHQDWLNGKEYKCKVSNKALPAPIEKTISKAKGQPREPQVYTLPPSREEMTKNQVSLTCLVKGFYPSDIAVEWESNGQPENNYKTTPPVLDSDGSFFLYSKLTVDKSRWQQGNVFSCSVMHEALHNHYTQKSLSLSPGK

SEQ ID NO: 369 - protein, 368 aa, Artificial Sequence
  Description of Artificial Sequence: Synthetic polypeptide
MDAMKRGLCCVLLLCGAVFVSPGASGRGEAETRECIYYNANWELERTNQSGLERCEGNQDKRLHCYASWRNSSGTIELVKKGCWLDDFNCYDRQECVATEENPQVYFCCCEGNFCNERFTHLPEAGGPEVTYEPPPTAPTGGGTHTCPPCPAPELLGGPSVFLFPPKPKDTLMISRTPEVTCVVVDVSHEDPEVKFNWYVDGVEVHNAKTKPREEQYNSTYRVVSVLTVLHQDWLNGKEYKCKVSNKALPAPIEKTISKAKGQPREPQVYTLPPSREEMTKNQVSLTCLVKGFYPSDIAVEWESNGQPENNYKTTPPVLDSDGSFFLYSKLTVDKSRWQQGNVFSCSVMHEALHNHYTQKSLSLSPGK

SEQ ID NO: 370 - DNA, 1104 bp, Artificial Sequence
  Description of Artificial Sequence: Synthetic polynucleotide
atggatgcaatgaagagagggctctgctgtgtgctgctgctgtgtggagcagtcttcgtttcgcccggcgcctctgggcgtggggaggctgagacacgggagtgcatctactacaacgccaactgggagctggagcgcaccaaccagagcggcctggagcgctgcgaaggcaaccaggacaagcggctgcactgctacgcctcctggcgcaacagctctggcaccatcgagctcgtgaagaagggctgctggctagatgacttcaactgctacgataggcaggagtgtgtggccactgaggagaacccccaggtgtacttctgctgctgtgaaggcaacttctgcaacgagcgcttcactcatttgccagaggctgggggcccggaagtcacgtacgagccacccccgacagcccccaccggtggtggaactcacacatgcccaccgtgcccagcacctgaactcctggggggaccgtcagtcttcctcttccccccaaaacccaaggacaccctcatgatctcccggacccctgaggtcacatgcgtggtggtggacgtgagccacgaagaccctgaggtcaagttcaactggtacgtggacggcgtggaggtgcataatgccaagacaaagccgcgggaggagcagtacaacagcacgtaccgtgtggtcagcgtcctcaccgtcctgcaccaggactggctgaatggcaaggagtacaagtgcaaggtctccaacaaagccctcccagcccccatcgagaaaaccatctccaaagccaaagggcagccccgagaaccacaggtgtacaccctgcccccatcccgggaggagatgaccaagaaccaggtcagcctgacctgcctggtcaaaggcttctatcccagcgacatcgccgtggagtgggagagcaatgggcagccggagaacaactacaagaccacgcctcccgtgctggactccgacggctccttcttcctctatagcaagctcaccgtggacaagagcaggtggcagcaggggaacgtcttctcatgctccgtgatgcatgaggctctgcacaaccactacacgcagaagagcctctccctgtctccgggtaaa

SEQ ID NO: 371 - protein, 343 aa, Artificial Sequence
  Description of Artificial Sequence: Synthetic polypeptide
GRGEAETRECIYYNANWELERTNQSGLERCEGNQDKRLHCYASWRNSSGTIELVKKGCWLDDFNCYDRQECVATEENPQVYFCCCEGNFCNERFTHLPEAGGPEVTYEPPPTAPTGGGTHTCPPCPAPELLGGPSVFLFPPKPKDTLMISRTPEVTCVVVDVSHEDPEVKFNWYVDGVEVHNAKTKPREEQYNSTYRVVSVLTVLHQDWLNGKEYKCKVSNKALPAPIEKTISKAKGQPREPQVYTLPPSREEMTKNQVSLTCLVKGFYPSDIAVEWESNGQPENNYKTTPPVLDSDGSFFLYSKLTVDKSRWQQGNVFSCSVMHEALHNHYTQKSLSLSPGK

SEQ ID NO: 372 - protein, 368 aa, Artificial Sequence
  Description of Artificial Sequence: Synthetic polypeptide
MDAMKRGLCCVLLLCGAVFVSPGASGRGEAETRECIYYNANWELERTNQSGLERCEGEQDKRLHCDASWRNSSGTIELVKKGCWLDDFNCYDRQECVATEENPQVYFCCCEGNFCNERFTHLPEAGGPEVTYEPPPTAPTGGGTHTCPPCPAPELLGGPSVFLFPPKPKDTLMISRTPEVTCVVVDVSHEDPEVKFNWYVDGVEVHNAKTKPREEQYNSTYRVVSVLTVLHQDWLNGKEYKCKVSNKALPAPIEKTISKAKGQPREPQVYTLPPSREEMTKNQVSLTCLVKGFYPSDIAVEWESNGQPENNYKTTPPVLDSDGSFFLYSKLTVDKSRWQQGNVFSCSVMHEALHNHYTQKSLSLSPGK

SEQ ID NO: 373 - DNA, 1104 bp, Artificial Sequence
  Description of Artificial Sequence: Synthetic polynucleotide
atggatgcaatgaagagagggctctgctgtgtgctgctgctgtgtggagcagtcttcgtttcgcccggcgcctctgggcgtggggaggctgagacacgggagtgcatctactacaacgccaactgggagctggagcgcaccaaccagagcggcctggagcgctgcgaaggcgagcaggacaagcggctgcactgcgacgcctcctggcgcaacagctctggcaccatcgagctcgtgaagaagggctgctggctagatgactttaactgctacgataggcaggagtgtgtggccactgaggagaacccccaggtgtacttctgctgctgtgaaggcaacttctgcaacgagcgcttcactcatttgccagaggctgggggcccggaagtcacgtacgagccacccccgacagcccccaccggtggtggaactcacacatgcccaccgtgcccagcacctgaactcctggggggaccgtcagtcttcctcttccccccaaaacccaaggacaccctcatgatctcccggacccctgaggtcacatgcgtggtggtggacgtgagccacgaagaccctgaggtcaagttcaactggtacgtggacggcgtggaggtgcataatgccaagacaaagccgcgggaggagcagtacaacagcacgtaccgtgtggtcagcgtcctcaccgtcctgcaccaggactggctgaatggcaaggagtacaagtgcaaggtctccaacaaagccctcccagcccccatcgagaaaaccatctccaaagccaaagggcagccccgagaaccacaggtgtacaccctgcccccatcccgggaggagatgaccaagaaccaggtcagcctgacctgcctggtcaaaggcttctatcccagcgacatcgccgtggagtgggagagcaatgggcagccggagaacaactacaagaccacgcctcccgtgctggactccgacggctccttcttcctctatagcaagctcaccgtggacaagagcaggtggcagcaggggaacgtcttctcatgctccgtgatgcatgaggctctgcacaaccactacacgcagaagagcctctccctgtctccgggtaaa

SEQ ID NO: 374 - protein, 343 aa, Artificial Sequence
  Description of Artificial Sequence: Synthetic polypeptide
GRGEAETRECIYYNANWELERTNQSGLERCEGEQDKRLHCDASWRNSSGTIELVKKGCWLDDFNCYDRQECVATEENPQVYFCCCEGNFCNERFTHLPEAGGPEVTYEPPPTAPTGGGTHTCPPCPAPELLGGPSVFLFPPKPKDTLMISRTPEVTCVVVDVSHEDPEVKFNWYVDGVEVHNAKTKPREEQYNSTYRVVSVLTVLHQDWLNGKEYKCKVSNKALPAPIEKTISKAKGQPREPQVYTLPPSREEMTKNQVSLTCLVKGFYPSDIAVEWESNGQPENNYKTTPPVLDSDGSFFLYSKLTVDKSRWQQGNVFSCSVMHEALHNHYTQKSLSLSPGK

SEQ ID NO: 375 - protein, 368 aa, Artificial Sequence
  Description of Artificial Sequence: Synthetic polypeptide
MDAMKRGLCCVLLLCGAVFVSPGASGRGEAETRECIYYNANWELERTNQSGLERCEGEQDKRLHCYASWRNSSRTIELVKKGCWLDDFNCYDRQECVATEENPQVYFCCCEGNFCNERFTHLPEAGGPEVTYEPPPTAPTGGGTHTCPPCPAPELLGGPSVFLFPPKPKDTLMISRTPEVTCVVVDVSHEDPEVKFNWYVDGVEVHNAKTKPREEQYNSTYRVVSVLTVLHQDWLNGKEYKCKVSNKALPAPIEKTISKAKGQPREPQVYTLPPSREEMTKNQVSLTCLVKGFYPSDIAVEWESNGQPENNYKTTPPVLDSDGSFFLYSKLTVDKSRWQQGNVFSCSVMHEALHNHYTQKSLSLSPGK

SEQ ID NO: 376 - DNA, 1104 bp, Artificial Sequence
  Description of Artificial Sequence: Synthetic polynucleotide
atggatgcaatgaagagagggctctgctgtgtgctgctgctgtgtggagcagtcttcgtttcgcccggcgcctctgggcgtggggaggctgagacacgggagtgcatctactacaacgccaactgggagctggagcgcaccaaccagagcggcctggagcgctgcgaaggcgagcaggacaagcggctgcactgctacgcctcctggcgcaacagctctaggaccatcgagctcgtgaagaagggctgctggctagatgactttaactgctacgataggcaggagtgtgtggccactgaggagaacccccaggtgtacttctgctgctgtgaaggcaacttctgcaacgagcgcttcactcatttgccagaggctgggggcccggaagtcacgtacgagccacccccgacagcccccaccggtggtggaactcacacatgcccaccgtgcccagcacctgaactcctggggggaccgtcagtcttcctcttccccccaaaacccaaggacaccctcatgatctcccggacccctgaggtcacatgcgtggtggtggacgtgagccacgaagaccctgaggtcaagttcaactggtacgtggacggcgtggaggtgcataatgccaagacaaagccgcgggaggagcagtacaacagcacgtaccgtgtggtcagcgtcctcaccgtcctgcaccaggactggctgaatggcaaggagtacaagtgcaaggtctccaacaaagccctcccagcccccatcgagaaaaccatctccaaagccaaagggcagccccgagaaccacaggtgtacaccctgcccccatcccgggaggagatgaccaagaaccaggtcagcctgacctgcctggtcaaaggcttctatcccagcgacatcgccgtggagtgggagagcaatgggcagccggagaacaactacaagaccacgcctcccgtgctggactccgacggctccttcttcctctatagcaagctcaccgtggacaagagcaggtggcagcaggggaacgtcttctcatgctccgtgatgcatgaggctctgcacaaccactacacgcagaagagcctctccctgtctccgggtaaa

SEQ ID NO: 377 - protein, 343 aa, Artificial Sequence
  Description of Artificial Sequence: Synthetic polypeptide
GRGEAETRECIYYNANWELERTNQSGLERCEGEQDKRLHCYASWRNSSRTIELVKKGCWLDDFNCYDRQECVATEENPQVYFCCCEGNFCNERFTHLPEAGGPEVTYEPPPTAPTGGGTHTCPPCPAPELLGGPSVFLFPPKPKDTLMISRTPEVTCVVVDVSHEDPEVKFNWYVDGVEVHNAKTKPREEQYNSTYRVVSVLTVLHQDWLNGKEYKCKVSNKALPAPIEKTISKAKGQPREPQVYTLPPSREEMTKNQVSLTCLVKGFYPSDIAVEWESNGQPENNYKTTPPVLDSDGSFFLYSKLTVDKSRWQQGNVFSCSVMHEALHNHYTQKSLSLSPGK

SEQ ID NO: 378 - protein, 368 aa, Artificial Sequence
  Description of Artificial Sequence: Synthetic polypeptide
MDAMKRGLCCVLLLCGAVFVSPGASGRGEAETRECIYYNANWELERTNQSGLERCEGEQDKRLHCYASWRNSSGTIELVEKGCWLDDFNCYDRQECVATEENPQVYFCCCEGNFCNERFTHLPEAGGPEVTYEPPPTAPTGGGTHTCPPCPAPELLGGPSVFLFPPKPKDTLMISRTPEVTCVVVDVSHEDPEVKFNWYVDGVEVHNAKTKPREEQYNSTYRVVSVLTVLHQDWLNGKEYKCKVSNKALPAPIEKTISKAKGQPREPQVYTLPPSREEMTKNQVSLTCLVKGFYPSDIAVEWESNGQPENNYKTTPPVLDSDGSFFLYSKLTVDKSRWQQGNVFSCSVMHEALHNHYTQKSLSLSPGK

SEQ ID NO: 379 - DNA, 1104 bp, Artificial Sequence
  Description of Artificial Sequence: Synthetic polynucleotide
atggatgcaatgaagagagggctctgctgtgtgctgctgctgtgtggagcagtcttcgtttcgcccggcgcctctgggcgtggggaggctgagacacgggagtgcatctactacaacgccaactgggagctggagcgcaccaaccagagcggcctggagcgctgcgaaggcgagcaggacaagcggctgcactgctacgcctcctggcgcaacagctctggcaccatcgagctcgtggagaagggctgctggctagatgactttaactgctacgataggcaggagtgtgtggccactgaggagaacccccaggtgtacttctgctgctgtgaaggcaacttctgcaacgagcgcttcactcatttgccagaggctgggggcccggaagtcacgtacgagccacccccgacagcccccaccggtggtggaactcacacatgcccaccgtgcccagcacctgaactcctggggggaccgtcagtcttcctcttccccccaaaacccaaggacaccctcatgatctcccggacccctgaggtcacatgcgtggtggtggacgtgagccacgaagaccctgaggtcaagttcaactggtacgtggacggcgtggaggtgcataatgccaagacaaagccgcgggaggagcagtacaacagcacgtaccgtgtggtcagcgtcctcaccgtcctgcaccaggactggctgaatggcaaggagtacaagtgcaaggtctccaacaaagccctcccagcccccatcgagaaaaccatctccaaagccaaagggcagccccgagaaccacaggtgtacaccctgcccccatcccgggaggagatgaccaagaaccaggtcagcctgacctgcctggtcaaaggcttctatcccagcgacatcgccgtggagtgggagagcaatgggcagccggagaacaactacaagaccacgcctcccgtgctggactccgacggctccttcttcctctatagcaagctcaccgtggacaagagcaggtggcagcaggggaacgtcttctcatgctccgtgatgcatgaggctctgcacaaccactacacgcagaagagcctctccctgtctccgggtaaa

SEQ ID NO: 380 - protein, 343 aa, Artificial Sequence
  Description of Artificial Sequence: Synthetic polypeptide
GRGEAETRECIYYNANWELERTNQSGLERCEGEQDKRLHCYASWRNSSGTIELVEKGCWLDDFNCYDRQECVATEENPQVYFCCCEGNFCNERFTHLPEAGGPEVTYEPPPTAPTGGGTHTCPPCPAPELLGGPSVFLFPPKPKDTLMISRTPEVTCVVVDVSHEDPEVKFNWYVDGVEVHNAKTKPREEQYNSTYRVVSVLTVLHQDWLNGKEYKCKVSNKALPAPIEKTISKAKGQPREPQVYTLPPSREEMTKNQVSLTCLVKGFYPSDIAVEWESNGQPENNYKTTPPVLDSDGSFFLYSKLTVDKSRWQQGNVFSCSVMHEALHNHYTQKSLSLSPGK

SEQ ID NO: 381 - protein, 368 aa, Artificial Sequence
  Description of Artificial Sequence: Synthetic polypeptide
MDAMKRGLCCVLLLCGAVFVSPGASGRGEAETRECIYYNANWELERTNQSGLERCEGEQDKRLHCYASWRNSSGTIELVKKGCYLDDFNCYDRQECVATEENPQVYFCCCEGNFCNERFTHLPEAGGPEVTYEPPPTAPTGGGTHTCPPCPAPELLGGPSVFLFPPKPKDTLMISRTPEVTCVVVDVSHEDPEVKFNWYVDGVEVHNAKTKPREEQYNSTYRVVSVLTVLHQDWLNGKEYKCKVSNKALPAPIEKTISKAKGQPREPQVYTLPPSREEMTKNQVSLTCLVKGFYPSDIAVEWESNGQPENNYKTTPPVLDSDGSFFLYSKLTVDKSRWQQGNVFSCSVMHEALHNHYTQKSLSLSPGK

SEQ ID NO: 382 - DNA, 1104 bp, Artificial Sequence
  Description of Artificial Sequence: Synthetic polynucleotide
atggatgcaatgaagagagggctctgctgtgtgctgctgctgtgtggagcagtcttcgtttcgcccggcgcctctgggcgtggggaggctgagacacgggagtgcatctactacaacgccaactgggagctggagcgcaccaaccagagcggcctggagcgctgcgaaggcgagcaggacaagcggctgcactgctacgcctcctggcgcaacagctctggcaccatcgagctcgtgaagaagggctgctacctagatgacttcaactgctacgataggcaggagtgtgtggccactgaggagaacccccaggtgtacttctgctgctgtgaaggcaacttctgcaacgagcgcttcactcatttgccagaggctgggggcccggaagtcacgtacgagccacccccgacagcccccaccggtggtggaactcacacatgcccaccgtgcccagcacctgaactcctggggggaccgtcagtcttcctcttccccccaaaacccaaggacaccctcatgatctcccggacccctgaggtcacatgcgtggtggtggacgtgagccacgaagaccctgaggtcaagttcaactggtacgtggacggcgtggaggtgcataatgccaagacaaagccgcgggaggagcagtacaacagcacgtaccgtgtggtcagcgtcctcaccgtcctgcaccaggactggctgaatggcaaggagtacaagtgcaaggtctccaacaaagccctcccagcccccatcgagaaaaccatctccaaagccaaagggcagccccgagaaccacaggtgtacaccctgcccccatcccgggaggagatgaccaagaaccaggtcagcctgacctgcctggtcaaaggcttctatcccagcgacatcgccgtggagtgggagagcaatgggcagccggagaacaactacaagaccacgcctcccgtgctggactccgacggctccttcttcctctatagcaagctcaccgtggacaagagcaggtggcagcaggggaacgtcttctcatgctccgtgatgcatgaggctctgcacaaccactacacgcagaagagcctctccctgtctccgggtaaa

SEQ ID NO: 383 - protein, 343 aa, Artificial Sequence
  Description of Artificial Sequence: Synthetic polypeptide
GRGEAETRECIYYNANWELERTNQSGLERCEGEQDKRLHCYASWRNSSGTIELVKKGCYLDDFNCYDRQECVATEENPQVYFCCCEGNFCNERFTHLPEAGGPEVTYEPPPTAPTGGGTHTCPPCPAPELLGGPSVFLFPPKPKDTLMISRTPEVTCVVVDVSHEDPEVKFNWYVDGVEVHNAKTKPREEQYNSTYRVVSVLTVLHQDWLNGKEYKCKVSNKALPAPIEKTISKAKGQPREPQVYTLPPSREEMTKNQVSLTCLVKGFYPSDIAVEWESNGQPENNYKTTPPVLDSDGSFFLYSKLTVDKSRWQQGNVFSCSVMHEALHNHYTQKSLSLSPGK

SEQ ID NO: 384 - protein, 368 aa, Artificial Sequence
  Description of Artificial Sequence: Synthetic polypeptide
MDAMKRGLCCVLLLCGAVFVSPGASGRGEAETRECIYYNANWELERTNQSGLERCEGEQDKRLHCYASWRNSSGTIELVKKGCWADDFNCYDRQECVATEENPQVYFCCCEGNFCNERFTHLPEAGGPEVTYEPPPTAPTGGGTHTCPPCPAPELLGGPSVFLFPPKPKDTLMISRTPEVTCVVVDVSHEDPEVKFNWYVDGVEVHNAKTKPREEQYNSTYRVVSVLTVLHQDWLNGKEYKCKVSNKALPAPIEKTISKAKGQPREPQVYTLPPSREEMTKNQVSLTCLVKGFYPSDIAVEWESNGQPENNYKTTPPVLDSDGSFFLYSKLTVDKSRWQQGNVFSCSVMHEALHNHYTQKSLSLSPGK

SEQ ID NO: 385 - DNA, 1104 bp, Artificial Sequence
  Description of Artificial Sequence: Synthetic polynucleotide
atggatgcaatgaagagagggctctgctgtgtgctgctgctgtgtggagcagtcttcgtttcgcccggcgcctctgggcgtggggaggctgagacacgggagtgcatctactacaacgccaactgggagctggagcgcaccaaccagagcggcctggagcgctgcgaaggcgagcaggacaagcggctgcactgctacgcctcctggcgcaacagctctggcaccatcgagctcgtgaagaagggctgctgggccgatgacttcaactgctacgataggcaggagtgtgtggccactgaggagaacccccaggtgtacttctgctgctgtgaaggcaacttctgcaacgagcgcttcactcatttgccagaggctgggggcccggaagtcacgtacgagccacccccgacagcccccaccggtggtggaactcacacatgcccaccgtgcccagcacctgaactcctggggggaccgtcagtcttcctcttccccccaaaacccaaggacaccctcatgatctcccggacccctgaggtcacatgcgtggtggtggacgtgagccacgaagaccctgaggtcaagttcaactggtacgtggacggcgtggaggtgcataatgccaagacaaagccgcgggaggagcagtacaacagcacgtaccgtgtggtcagcgtcctcaccgtcctgcaccaggactggctgaatggcaaggagtacaagtgcaaggtctccaacaaagccctcccagcccccatcgagaaaaccatctccaaagccaaagggcagccccgagaaccacaggtgtacaccctgcccccatcccgggaggagatgaccaagaaccaggtcagcctgacctgcctggtcaaaggcttctatcccagcgacatcgccgtggagtgggagagcaatgggcagccggagaacaactacaagaccacgcctcccgtgctggactccgacggctccttcttcctctatagcaagctcaccgtggacaagagcaggtggcagcaggggaacgtcttctcatgctccgtgatgcatgaggctctgcacaaccactacacgcagaagagcctctccctgtccccgggtaaa

SEQ ID NO: 386 - protein, 343 aa, Artificial Sequence
  Description of Artificial Sequence: Synthetic polypeptide
GRGEAETRECIYYNANWELERTNQSGLERCEGEQDKRLHCYASWRNSSGTIELVKKGCWADDFNCYDRQECVATEENPQVYFCCCEGNFCNERFTHLPEAGGPEVTYEPPPTAPTGGGTHTCPPCPAPELLGGPSVFLFPPKPKDTLMISRTPEVTCVVVDVSHEDPEVKFNWYVDGVEVHNAKTKPREEQYNSTYRVVSVLTVLHQDWLNGKEYKCKVSNKALPAPIEKTISKAKGQPREPQVYTLPPSREEMTKNQVSLTCLVKGFYPSDIAVEWESNGQPENNYKTTPPVLDSDGSFFLYSKLTVDKSRWQQGNVFSCSVMHEALHNHYTQKSLSLSPGK

SEQ ID NO: 387 - protein, 368 aa, Artificial Sequence
  Description of Artificial Sequence: Synthetic polypeptide
MDAMKRGLCCVLLLCGAVFVSPGASGRGEAETRECIYYNANWELERTNQSGLERCEGEQDKRLHCYASWRNSSGTIELVKKGCWKDDFNCYDRQECVATEENPQVYFCCCEGNFCNERFTHLPEAGGPEVTYEPPPTAPTGGGTHTCPPCPAPELLGGPSVFLFPPKPKDTLMISRTPEVTCVVVDVSHEDPEVKFNWYVDGVEVHNAKTKPREEQYNSTYRVVSVLTVLHQDWLNGKEYKCKVSNKALPAPIEKTISKAKGQPREPQVYTLPPSREEMTKNQVSLTCLVKGFYPSDIAVEWESNGQPENNYKTTPPVLDSDGSFFLYSKLTVDKSRWQQGNVFSCSVMHEALHNHYTQKSLSLSPGK

SEQ ID NO: 388 - DNA, 1104 bp, Artificial Sequence
  Description of Artificial Sequence: Synthetic polynucleotide
atggatgcaatgaagagagggctctgctgtgtgctgctgctgtgtggagcagtcttcgtttcgcccggcgcctctgggcgtggggaggctgagacacgggagtgcatctactacaacgccaactgggagctggagcgcaccaaccagagcggcctggagcgctgcgaaggcgagcaggacaagcggctgcactgctacgcctcctggcgcaacagctctggcaccatcgagctcgtgaagaagggctgctggaaggatgacttcaactgctacgataggcaggagtgtgtggccactgaggagaacccccaggtgtacttctgctgctgtgaaggcaacttctgcaacgagcgcttcactcatttgccagaggctgggggcccggaagtcacgtacgagccacccccgacagcccccaccggtggtggaactcacacatgcccaccgtgcccagcacctgaactcctggggggaccgtcagtcttcctcttccccccaaaacccaaggacaccctcatgatctcccggacccctgaggtcacatgcgtggtggtggacgtgagccacgaagaccctgaggtcaagttcaactggtacgtggacggcgtggaggtgcataatgccaagacaaagccgcgggaggagcagtacaacagcacgtaccgtgtggtcagcgtcctcaccgtcctgcaccaggactggctgaatggcaaggagtacaagtgcaaggtctccaacaaagccctcccagcccccatcgagaaaaccatctccaaagccaaagggcagccccgagaaccacaggtgtacaccctgcccccatcccgggaggagatgaccaagaaccaggtcagcctgacctgcctggtcaaaggcttctatcccagcgacatcgccgtggagtgggagagcaatgggcagccggagaacaactacaagaccacgcctcccgtgctggactccgacggctccttcttcctctatagcaagctcaccgtggacaagagcaggtggcagcaggggaacgtcttctcatgctccgtgatgcatgaggctctgcacaaccactacacgcagaagagcctctccctgtctccgggtaaa

SEQ ID NO: 389 - protein, 343 aa, Artificial Sequence
  Description of Artificial Sequence: Synthetic polypeptide
GRGEAETRECIYYNANWELERTNQSGLERCEGEQDKRLHCYASWRNSSGTIELVKKGCWKDDFNCYDRQECVATEENPQVYFCCCEGNFCNERFTHLPEAGGPEVTYEPPPTAPTGGGTHTCPPCPAPELLGGPSVFLFPPKPKDTLMISRTPEVTCVVVDVSHEDPEVKFNWYVDGVEVHNAKTKPREEQYNSTYRVVSVLTVLHQDWLNGKEYKCKVSNKALPAPIEKTISKAKGQPREPQVYTLPPSREEMTKNQVSLTCLVKGFYPSDIAVEWESNGQPENNYKTTPPVLDSDGSFFLYSKLTVDKSRWQQGNVFSCSVMHEALHNHYTQKSLSLSPGK

SEQ ID NO: 390 - protein, 368 aa, Artificial Sequence
  Description of Artificial Sequence: Synthetic polypeptide
MDAMKRGLCCVLLLCGAVFVSPGASGRGEAETRECIYYNANWELERTNQSGLERCEGEQDKRLHCYASWRNSSGTIELVKKGCWSDDFNCYDRQECVATEENPQVYFCCCEGNFCNERFTHLPEAGGPEVTYEPPPTAPTGGGTHTCPPCPAPELLGGPSVFLFPPKPKDTLMISRTPEVTCVVVDVSHEDPEVKFNWYVDGVEVHNAKTKPREEQYNSTYRVVSVLTVLHQDWLNGKEYKCKVSNKALPAPIEKTISKAKGQPREPQVYTLPPSREEMTKNQVSLTCLVKGFYPSDIAVEWESNGQPENNYKTTPPVLDSDGSFFLYSKLTVDKSRWQQGNVFSCSVMHEALHNHYTQKSLSLSPGK

SEQ ID NO: 391 - DNA, 1104 bp, Artificial Sequence
  Description of Artificial Sequence: Synthetic polynucleotide
atggatgcaatgaagagagggctctgctgtgtgctgctgctgtgtggagcagtcttcgtttcgcccggcgcctctgggcgtggggaggctgagacacgggagtgcatctactacaacgccaactgggagctggagcgcaccaaccagagcggcctggagcgctgcgaaggcgagcaggacaagcggctgcactgctacgcctcctggcgcaacagctctggcaccatcgagctcgtgaagaagggctgctggagcgatgacttcaactgctacgataggcaggagtgtgtggccactgaggagaacccccaggtgtacttctgctgctgtgaaggcaacttctgcaacgagcgcttcactcatttgccagaggctgggggcccggaagtcacgtacgagccacccccgacagcccccaccggtggtggaactcacacatgcccaccgtgcccagcacctgaactcctggggggaccgtcagtcttcctcttccccccaaaacccaaggacaccctcatgatctcccggacccctgaggtcacatgcgtggtggtggacgtgagccacgaagaccctgaggtcaagttcaactggtacgtggacggcgtggaggtgcataatgccaagacaaagccgcgggaggagcagtacaacagcacgtaccgtgtggtcagcgtcctcaccgtcctgcaccaggactggctgaatggcaaggagtacaagtgcaaggtctccaacaaagccctcccagcccccatcgagaaaaccatctccaaagccaaagggcagccccgagaaccacaggtgtacaccctgcccccatcccgggaggagatgaccaagaaccaggtcagcctgacctgcctggtcaaaggcttctatcccagcgacatcgccgtggagtgggagagcaatgggcagccggagaacaactacaagaccacgcctcccgtgctggactccgacggctccttcttcctctatagcaagctcaccgtggacaagagcaggtggcagcaggggaacgtcttctcatgctccgtgatgcatgaggctctgcacaaccactacacgcagaagagcctctccctgtctccgggtaaa

SEQ ID NO: 392 - protein, 343 aa, Artificial Sequence
  Description of Artificial Sequence: Synthetic polypeptide
GRGEAETRECIYYNANWELERTNQSGLERCEGEQDKRLHCYASWRNSSGTIELVKKGCWSDDFNCYDRQECVATEENPQVYFCCCEGNFCNERFTHLPEAGGPEVTYEPPPTAPTGGGTHTCPPCPAPELLGGPSVFLFPPKPKDTLMISRTPEVTCVVVDVSHEDPEVKFNWYVDGVEVHNAKTKPREEQYNSTYRVVSVLTVLHQDWLNGKEYKCKVSNKALPAPIEKTISKAKGQPREPQVYTLPPSREEMTKNQVSLTCLVKGFYPSDIAVEWESNGQPENNYKTTPPVLDSDGSFFLYSKLTVDKSRWQQGNVFSCSVMHEALHNHYTQKSLSLSPGK

SEQ ID NO: 393 - protein, 368 aa, Artificial Sequence
  Description of Artificial Sequence: Synthetic polypeptide
MDAMKRGLCCVLLLCGAVFVSPGASGRGEAETRECIYYNANWELERTNQSGLERCEGEQDKRLHCYASWRNSSGTIELVKKGCWWDDFNCYDRQECVATEENPQVYFCCCEGNFCNERFTHLPEAGGPEVTYEPPPTAPTGGGTHTCPPCPAPELLGGPSVFLFPPKPKDTLMISRTPEVTCVVVDVSHEDPEVKFNWYVDGVEVHNAKTKPREEQYNSTYRVVSVLTVLHQDWLNGKEYKCKVSNKALPAPIEKTISKAKGQPREPQVYTLPPSREEMTKNQVSLTCLVKGFYPSDIAVEWESNGQPENNYKTTPPVLDSDGSFFLYSKLTVDKSRWQQGNVFSCSVMHEALHNHYTQKSLSLSPGK

SEQ ID NO: 394 - DNA, 1104 bp, Artificial Sequence
  Description of Artificial Sequence: Synthetic polynucleotide
atggatgcaatgaagagagggctctgctgtgtgctgctgctgtgtggagcagtcttcgtttcgcccggcgcctctgggcgtggggaggctgagacacgggagtgcatctactacaacgccaactgggagctggagcgcaccaaccagagcggcctggagcgctgcgaaggcgagcaggacaagcggctgcactgctacgcctcctggcgcaacagctctggcaccatcgagctcgtgaagaagggctgctggtgggatgactttaactgctacgataggcaggagtgtgtggccactgaggagaacccccaggtgtacttctgctgctgtgaaggcaacttctgcaacgagcgcttcactcatttgccagaggctgggggcccggaagtcacgtacgagccacccccgacagcccccaccggtggtggaactcacacatgcccaccgtgcccagcacctgaactcctggggggaccgtcagtcttcctcttccccccaaaacccaaggacaccctcatgatctcccggacccctgaggtcacatgcgtggtggtggacgtgagccacgaagaccctgaggtcaagttcaactggtacgtggacggcgtggaggtgcataatgccaagacaaagccgcgggaggagcagtacaacagcacgtaccgtgtggtcagcgtcctcaccgtcctgcaccaggactggctgaatggcaaggagtacaagtgcaaggtctccaacaaagccctcccagcccccatcgagaaaaccatctccaaagccaaagggcagccccgagaaccacaggtgtacaccctgcccccatcccgggaggagatgaccaagaaccaggtcagcctgacctgcctggtcaaaggcttctatcccagcgacatcgccgtggagtgggagagcaatgggcagccggagaacaactacaagaccacgcctcccgtgctggactccgacggctccttcttcctctatagcaagctcaccgtggacaagagcaggtggcagcaggggaacgtcttctcatgctccgtgatgcatgaggctctgcacaaccactacacgcagaagagcctctccctgtctccgggtaaa

SEQ ID NO: 395 - protein, 343 aa, Artificial Sequence
  Description of Artificial Sequence: Synthetic polypeptide
GRGEAETRECIYYNANWELERTNQSGLERCEGEQDKRLHCYASWRNSSGTIELVKKGCWWDDFNCYDRQECVATEENPQVYFCCCEGNFCNERFTHLPEAGGPEVTYEPPPTAPTGGGTHTCPPCPAPELLGGPSVFLFPPKPKDTLMISRTPEVTCVVVDVSHEDPEVKFNWYVDGVEVHNAKTKPREEQYNSTYRVVSVLTVLHQDWLNGKEYKCKVSNKALPAPIEKTISKAKGQPREPQVYTLPPSREEMTKNQVSLTCLVKGFYPSDIAVEWESNGQPENNYKTTPPVLDSDGSFFLYSKLTVDKSRWQQGNVFSCSVMHEALHNHYTQKSLSLSPGK

SEQ ID NO: 396 - protein, 368 aa, Artificial Sequence
  Description of Artificial Sequence: Synthetic polypeptide
MDAMKRGLCCVLLLCGAVFVSPGASGRGEAETRECIYYNANWELERTNQSGLERCEGEQDKRLHCYASWRNSSGTIELVKKGCWLDDDNCYDRQECVATEENPQVYFCCCEGNFCNERFTHLPEAGGPEVTYEPPPTAPTGGGTHTCPPCPAPELLGGPSVFLFPPKPKDTLMISRTPEVTCVVVDVSHEDPEVKFNWYVDGVEVHNAKTKPREEQYNSTYRVVSVLTVLHQDWLNGKEYKCKVSNKALPAPIEKTISKAKGQPREPQVYTLPPSREEMTKNQVSLTCLVKGFYPSDIAVEWESNGQPENNYKTTPPVLDSDGSFFLYSKLTVDKSRWQQGNVFSCSVMHEALHNHYTQKSLSLSPGK

SEQ ID NO: 397 - DNA, 1104 bp, Artificial Sequence
  Description of Artificial Sequence: Synthetic polynucleotide
atggatgcaatgaagagagggctctgctgtgtgctgctgctgtgtggagcagtcttcgtttcgcccggcgcctctgggcgtggggaggctgagacacgggagtgcatctactacaacgccaactgggagctggagcgcaccaaccagagcggcctggagcgctgcgaaggcgagcaggacaagcggctgcactgctacgcctcctggcgcaacagctctggcaccatcgagctcgtgaagaagggctgctggctagatgacgacaactgctacgataggcaggagtgtgtggccactgaggagaacccccaggtgtacttctgctgctgtgaaggcaacttctgcaacgagcgcttcactcatttgccagaggctgggggcccggaagtcacgtacgagccacccccgacagcccccaccggtggtggaactcacacatgcccaccgtgcccagcacctgaactcctggggggaccgtcagtcttcctcttccccccaaaacccaaggacaccctcatgatctcccggacccctgaggtcacatgcgtggtggtggacgtgagccacgaagaccctgaggtcaagttcaactggtacgtggacggcgtggaggtgcataatgccaagacaaagccgcgggaggagcagtacaacagcacgtaccgtgtggtcagcgtcctcaccgtcctgcaccaggactggctgaatggcaaggagtacaagtgcaaggtctccaacaaagccctcccagcccccatcgagaaaaccatctccaaagccaaagggcagccccgagaaccacaggtgtacaccctgcccccatcccgggaggagatgaccaagaaccaggtcagcctgacctgcctggtcaaaggcttctatcccagcgacatcgccgtggagtgggagagcaatgggcagccggagaacaactacaagaccacgcctcccgtgctggactccgacggctccttcttcctctatagcaagctcaccgtggacaagagcaggtggcagcaggggaacgtcttctcatgctccgtgatgcatgaggctctgcacaaccactacacgcagaagagcctctccctgtctccgggtaaa

SEQ ID NO: 398 - protein, 343 aa, Artificial Sequence
  Description of Artificial Sequence: Synthetic polypeptide
GRGEAETRECIYYNANWELERTNQSGLERCEGEQDKRLHCYASWRNSSGTIELVKKGCWLDDDNCYDRQECVATEENPQVYFCCCEGNFCNERFTHLPEAGGPEVTYEPPPTAPTGGGTHTCPPCPAPELLGGPSVFLFPPKPKDTLMISRTPEVTCVVVDVSHEDPEVKFNWYVDGVEVHNAKTKPREEQYNSTYRVVSVLTVLHQDWLNGKEYKCKVSNKALPAPIEKTISKAKGQPREPQVYTLPPSREEMTKNQVSLTCLVKGFYPSDIAVEWESNGQPENNYKTTPPVLDSDGSFFLYSKLTVDKSRWQQGNVFSCSVMHEALHNHYTQKSLSLSPGK

SEQ ID NO: 399 - protein, 368 aa, Artificial Sequence
  Description of Artificial Sequence: Synthetic polypeptide
MDAMKRGLCCVLLLCGAVFVSPGASGRGEAETRECIYYNANWELERTNQSGLERCEGEQDKRLHCYASWRNSSGTIELVKKGCWLDDENCYDRQECVATEENPQVYFCCCEGNFCNERFTHLPEAGGPEVTYEPPPTAPTGGGTHTCPPCPAPELLGGPSVFLFPPKPKDTLMISRTPEVTCVVVDVSHEDPEVKFNWYVDGVEVHNAKTKPREEQYNSTYRVVSVLTVLHQDWLNGKEYKCKVSNKALPAPIEKTISKAKGQPREPQVYTLPPSREEMTKNQVSLTCLVKGFYPSDIAVEWESNGQPENNYKTTPPVLDSDGSFFLYSKLTVDKSRWQQGNVFSCSVMHEALHNHYTQKSLSLSPGK

SEQ ID NO: 400 - DNA, 1104 bp, Artificial Sequence
  Description of Artificial Sequence: Synthetic polynucleotide
atggatgcaatgaagagagggctctgctgtgtgctgctgctgtgtggagcagtcttcgtttcgcccggcgcctctgggcgtggggaggctgagacacgggagtgcatctactacaacgccaactgggagctggagcgcaccaaccagagcggcctggagcgctgcgaaggcgagcaggacaagcggctgcactgctacgcctcctggcgcaacagctctggcaccatcgagctcgtgaagaagggctgctggctagatgacgagaactgctacgataggcaggagtgtgtggccactgaggagaacccccaggtgtacttctgctgctgtgaaggcaacttctgcaacgagcgcttcactcatttgccagaggctgggggcccggaagtcacgtacgagccacccccgacagcccccaccggtggtggaactcacacatgcccaccgtgcccagcacctgaactcctggggggaccgtcagtcttcctcttccccccaaaacccaaggacaccctcatgatctcccggacccctgaggtcacatgcgtggtggtggacgtgagccacgaagaccctgaggtcaagttcaactggtacgtggacggcgtggaggtgcataatgccaagacaaagccgcgggaggagcagtacaacagcacgtaccgtgtggtcagcgtcctcaccgtcctgcaccaggactggctgaatggcaaggagtacaagtgcaaggtctccaacaaagccctcccagcccccatcgagaaaaccatctccaaagccaaagggcagccccgagaaccacaggtgtacaccctgcccccatcccgggaggagatgaccaagaaccaggtcagcctgacctgcctggtcaaaggcttctatcccagcgacatcgccgtggagtgggagagcaatgggcagccggagaacaactacaagaccacgcctcccgtgctggactccgacggctccttcttcctctatagcaagctcaccgtggacaagagcaggtggcagcaggggaacgtcttctcatgctccgtgatgcatgaggctctgcacaaccactacacgcagaagagcctctccctgtctccgggtaaa

SEQ ID NO: 401 - protein, 343 aa, Artificial Sequence
  Description of Artificial Sequence: Synthetic polypeptide
GRGEAETRECIYYNANWELERTNQSGLERCEGEQDKRLHCYASWRNSSGTIELVKKGCWLDDENCYDRQECVATEENPQVYFCCCEGNFCNERFTHLPEAGGPEVTYEPPPTAPTGGGTHTCPPCPAPELLGGPSVFLFPPKPKDTLMISRTPEVTCVVVDVSHEDPEVKFNWYVDGVEVHNAKTKPREEQYNSTYRVVSVLTVLHQDWLNGKEYKCKVSNKALPAPIEKTISKAKGQPREPQVYTLPPSREEMTKNQVSLTCLVKGFYPSDIAVEWESNGQPENNYKTTPPVLDSDGSFFLYSKLTVDKSRWQQGNVFSCSVMHEALHNHYTQKSLSLSPGK

SEQ ID NO: 402 - protein, 368 aa, Artificial Sequence
  Description of Artificial Sequence: Synthetic polypeptide
MDAMKRGLCCVLLLCGAVFVSPGASGRGEAETRECIYYNANWELERTNQSGLERCEGEQDKRLHCYASWRNSSGTIELVKKGCWLDDLNCYDRQECVATEENPQVYFCCCEGNFCNERFTHLPEAGGPEVTYEPPPTAPTGGGTHTCPPCPAPELLGGPSVFLFPPKPKDTLMISRTPEVTCVVVDVSHEDPEVKFNWYVDGVEVHNAKTKPREEQYNSTYRVVSVLTVLHQDWLNGKEYKCKVSNKALPAPIEKTISKAKGQPREPQVYTLPPSREEMTKNQVSLTCLVKGFYPSDIAVEWESNGQPENNYKTTPPVLDSDGSFFLYSKLTVDKSRWQQGNVFSCSVMHEALHNHYTQKSLSLSPGK

SEQ ID NO: 403 - DNA, 1104 bp, Artificial Sequence
  Description of Artificial Sequence: Synthetic polynucleotide
atggatgcaatgaagagagggctctgctgtgtgctgctgctgtgtggagcagtcttcgtttcgcccggcgcctctgggcgtggggaggctgagacacgggagtgcatctactacaacgccaactgggagctggagcgcaccaaccagagcggcctggagcgctgcgaaggcgagcaggacaagcggctgcactgctacgcctcctggcgcaacagctctggcaccatcgagctcgtgaagaagggctgctggctagatgacctgaactgctacgataggcaggagtgtgtggccactgaggagaacccccaggtgtacttctgctgctgtgaaggcaacttctgcaacgagcgcttcactcatttgccagaggctgggggcccggaagtcacgtacgagccacccccgacagcccccaccggtggtggaactcacacatgcccaccgtgcccagcacctgaactcctggggggaccgtcagtcttcctcttccccccaaaacccaaggacaccctcatgatctcccggacccctgaggtcacatgcgtggtggtggacgtgagccacgaagaccctgaggtcaagttcaactggtacgtggacggcgtggaggtgcataatgccaagacaaagccgcgggaggagcagtacaacagcacgtaccgtgtggtcagcgtcctcaccgtcctgcaccaggactggctgaatggcaaggagtacaagtgcaaggtctccaacaaagccctcccagcccccatcgagaaaaccatctccaaagccaaagggcagccccgagaaccacaggtgtacaccctgcccccatcccgggaggagatgaccaagaaccaggtcagcctgacctgcctggtcaaaggcttctatcccagcgacatcgccgtggagtgggagagcaatgggcagccggagaacaactacaagaccacgcctcccgtgctggactccgacggctccttcttcctctatagcaagctcaccgtggacaagagcaggtggcagcaggggaacgtcttctcatgctccgtgatgcatgaggctctgcacaaccactacacgcagaagagcctctccctgtctccgggtaaa

SEQ ID NO: 404 - protein, 343 aa, Artificial Sequence
  Description of Artificial Sequence: Synthetic polypeptide
GRGEAETRECIYYNANWELERTNQSGLERCEGEQDKRLHCYASWRNSSGTIELVKKGCWLDDLNCYDRQECVATEENPQVYFCCCEGNFCNERFTHLPEAGGPEVTYEPPPTAPTGGGTHTCPPCPAPELLGGPSVFLFPPKPKDTLMISRTPEVTCVVVDVSHEDPEVKFNWYVDGVEVHNAKTKPREEQYNSTYRVVSVLTVLHQDWLNGKEYKCKVSNKALPAPIEKTISKAKGQPREPQVYTLPPSREEMTKNQVSLTCLVKGFYPSDIAVEWESNGQPENNYKTTPPVLDSDGSFFLYSKLTVDKSRWQQGNVFSCSVMHEALHNHYTQKSLSLSPGK

SEQ ID NO: 405 - protein, 368 aa, Artificial Sequence
  Description of Artificial Sequence: Synthetic polypeptide
MDAMKRGLCCVLLLCGAVFVSPGASGRGEAETRECIYYNANWELERTNQSGLERCEGEQDKRLHCYASWRNSSGTIELVKKGCWLDDSNCYDRQECVATEENPQVYFCCCEGNFCNERFTHLPEAGGPEVTYEPPPTAPTGGGTHTCPPCPAPELLGGPSVFLFPPKPKDTLMISRTPEVTCVVVDVSHEDPEVKFNWYVDGVEVHNAKTKPREEQYNSTYRVVSVLTVLHQDWLNGKEYKCKVSNKALPAPIEKTISKAKGQPREPQVYTLPPSREEMTKNQVSLTCLVKGFYPSDIAVEWESNGQPENNYKTTPPVLDSDGSFFLYSKLTVDKSRWQQGNVFSCSVMHEALHNHYTQKSLSLSPGK

SEQ ID NO: 406 - DNA, 1104 bp, Artificial Sequence
  Description of Artificial Sequence: Synthetic polynucleotide
atggatgcaatgaagagagggctctgctgtgtgctgctgctgtgtggagcagtcttcgtttcgcccggcgcctctgggcgtggggaggctgagacacgggagtgcatctactacaacgccaactgggagctggagcgcaccaaccagagcggcctggagcgctgcgaaggcgagcaggacaagcggctgcactgctacgcctcctggcgcaacagctctggcaccatcgagctcgtgaagaagggctgctggctagatgactccaactgctacgataggcaggagtgtgtggccactgaggagaacccccaggtgtacttctgctgctgtgaaggcaacttctgcaacgagcgcttcactcatttgccagaggctgggggcccggaagtcacgtacgagccacccccgacagcccccaccggtggtggaactcacacatgcccaccgtgcccagcacctgaactcctggggggaccgtcagtcttcctcttccccccaaaacccaaggacaccctcatgatctcccggacccctgaggtcacatgcgtggtggtggacgtgagccacgaagaccctgaggtcaagttcaactggtacgtggacggcgtggaggtgcataatgccaagacaaagccgcgggaggagcagtacaacagcacgtaccgtgtggtcagcgtcctcaccgtcctgcaccaggactggctgaatggcaaggagtacaagtgcaaggtctccaacaaagccctcccagcccccatcgagaaaaccatctccaaagccaaagggcagccccgagaaccacaggtgtacaccctgcccccatcccgggaggagatgaccaagaaccaggtcagcctgacctgcctggtcaaaggcttctatcccagcgacatcgccgtggagtgggagagcaatgggcagccggagaacaactacaagaccacgcctcccgtgctggactccgacggctccttcttcctctatagcaagctcaccgtggacaagagcaggtggcagcaggggaacgtcttctcatgctccgtgatgcatgaggctctgcacaaccactacacgcagaagagcctctccctgtctccgggtaaa

SEQ ID NO: 407 - protein, 343 aa, Artificial Sequence
  Description of Artificial Sequence: Synthetic polypeptide
GRGEAETRECIYYNANWELERTNQSGLERCEGEQDKRLHCYASWRNSSGTIELVKKGCWLDDSNCYDRQECVATEENPQVYFCCCEGNFCNERFTHLPEAGGPEVTYEPPPTAPTGGGTHTCPPCPAPELLGGPSVFLFPPKPKDTLMISRTPEVTCVVVDVSHEDPEVKFNWYVDGVEVHNAKTKPREEQYNSTYRVVSVLTVLHQDWLNGKEYKCKVSNKALPAPIEKTISKAKGQPREPQVYTLPPSREEMTKNQVSLTCLVKGFYPSDIAVEWESNGQPENNYKTTPPVLDSDGSFFLYSKLTVDKSRWQQGNVFSCSVMHEALHNHYTQKSLSLSPGK

SEQ ID NO: 408 - protein, 368 aa, Artificial Sequence
  Description of Artificial Sequence: Synthetic polypeptide
MDAMKRGLCCVLLLCGAVFVSPGASGRGEAETRECIYYNANWELERTNQSGLERCEGEQDKRLHCYASWRNSSGTIELVKKGCWLDDYNCYDRQECVATEENPQVYFCCCEGNFCNERFTHLPEAGGPEVTYEPPPTAPTGGGTHTCPPCPAPELLGGPSVFLFPPKPKDTLMISRTPEVTCVVVDVSHEDPEVKFNWYVDGVEVHNAKTKPREEQYNSTYRVVSVLTVLHQDWLNGKEYKCKVSNKALPAPIEKTISKAKGQPREPQVYTLPPSREEMTKNQVSLTCLVKGFYPSDIAVEWESNGQPENNYKTTPPVLDSDGSFFLYSKLTVDKSRWQQGNVFSCSVMHEALHNHYTQKSLSLSPGK

SEQ ID NO: 409 - DNA, 1104 bp, Artificial Sequence
  Description of Artificial Sequence: Synthetic polynucleotide
atggatgcaatgaagagagggctctgctgtgtgctgctgctgtgtggagcagtcttcgtttcgcccggcgcctctgggcgtggggaggctgagacacgggagtgcatctactacaacgccaactgggagctggagcgcaccaaccagagcggcctggagcgctgcgaaggcgagcaggacaagcggctgcactgctacgcctcctggcgcaacagctctggcaccatcgagctcgtgaagaagggctgctggctagatgactacaactgctacgataggcaggagtgtgtggccactgaggagaacccccaggtgtacttctgctgctgtgaaggcaacttctgcaacgagcgcttcactcatttgccagaggctgggggcccggaagtcacgtacgagccacccccgacagcccccaccggtggtggaactcacacatgcccaccgtgcccagcacctgaactcctggggggaccgtcagtcttcctcttccccccaaaacccaaggacaccctcatgatctcccggacccctgaggtcacatgcgtggtggtggacgtgagccacgaagaccctgaggtcaagttcaactggtacgtggacggcgtggaggtgcataatgccaagacaaagccgcgggaggagcagtacaacagcacgtaccgtgtggtcagcgtcctcaccgtcctgcaccaggactggctgaatggcaaggagtacaagtgcaaggtctccaacaaagccctcccagcccccatcgagaaaaccatctccaaagccaaagggcagccccgagaaccacaggtgtacaccctgcccccatcccgggaggagatgaccaagaaccaggtcagcctgacctgcctggtcaaaggcttctatcccagcgacatcgccgtggagtgggagagcaatgggcagccggagaacaactacaagaccacgcctcccgtgctggactccgacggctccttcttcctctatagcaagctcaccgtggacaagagcaggtggcagcaggggaacgtcttctcatgctccgtgatgcatgaggctctgcacaaccactacacgcagaagagcctctccctgtctccgggtaaa

SEQ ID NO: 410 - protein, 343 aa, Artificial Sequence
  Description of Artificial Sequence: Synthetic polypeptide
GRGEAETRECIYYNANWELERTNQSGLERCEGEQDKRLHCYASWRNSSGTIELVKKGCWLDDYNCYDRQECVATEENPQVYFCCCEGNFCNERFTHLPEAGGPEVTYEPPPTAPTGGGTHTCPPCPAPELLGGPSVFLFPPKPKDTLMISRTPEVTCVVVDVSHEDPEVKFNWYVDGVEVHNAKTKPREEQYNSTYRVVSVLTVLHQDWLNGKEYKCKVSNKALPAPIEKTISKAKGQPREPQVYTLPPSREEMTKNQVSLTCLVKGFYPSDIAVEWESNGQPENNYKTTPPVLDSDGSFFLYSKLTVDKSRWQQGNVFSCSVMHEALHNHYTQKSLSLSPGK

SEQ ID NO: 411 - protein, 368 aa, Artificial Sequence
  Description of Artificial Sequence: Synthetic polypeptide
MDAMKRGLCCVLLLCGAVFVSPGASGRGEAETRECIYYNANWELERTNQSGLERCEGEQDKRLHCYASWRNSSGTIELVKKGCWLDDFNCYDRQECVATKENPQVYFCCCEGNFCNERFTHLPEAGGPEVTYEPPPTAPTGGGTHTCPPCPAPELLGGPSVFLFPPKPKDTLMISRTPEVTCVVVDVSHEDPEVKFNWYVDGVEVHNAKTKPREEQYNSTYRVVSVLTVLHQDWLNGKEYKCKVSNKALPAPIEKTISKAKGQPREPQVYTLPPSREEMTKNQVSLTCLVKGFYPSDIAVEWESNGQPENNYKTTPPVLDSDGSFFLYSKLTVDKSRWQQGNVFSCSVMHEALHNHYTQKSLSLSPGK

SEQ ID NO: 412 - DNA, 1104 bp, Artificial Sequence
  Description of Artificial Sequence: Synthetic polynucleotide
atggatgcaatgaagagagggctctgctgtgtgctgctgctgtgtggagcagtcttcgtttcgcccggcgcctctgggcgtggggaggctgagacacgggagtgcatctactacaacgccaactgggagctggagcgcaccaaccagagcggcctggagcgctgcgaaggcgagcaggacaagcggctgcactgctacgcctcctggcgcaacagctctggcaccatcgagctcgtgaagaagggctgctggctagatgacttcaactgctacgataggcaggagtgtgtggccactaaggagaacccccaggtgtacttctgctgctgtgaaggcaacttctgcaacgagcgcttcactcatttgccagaggctgggggcccggaagtcacgtacgagccacccccgacagcccccaccggtggtggaactcacacatgcccaccgtgcccagcacctgaactcctggggggaccgtcagtcttcctcttccccccaaaacccaaggacaccctcatgatctcccggacccctgaggtcacatgcgtggtggtggacgtgagccacgaagaccctgaggtcaagttcaactggtacgtggacggcgtggaggtgcataatgccaagacaaagccgcgggaggagcagtacaacagcacgtaccgtgtggtcagcgtcctcaccgtcctgcaccaggactggctgaatggcaaggagtacaagtgcaaggtctccaacaaagccctcccagcccccatcgagaaaaccatctccaaagccaaagggcagccccgagaaccacaggtgtacaccctgcccccatcccgggaggagatgaccaagaaccaggtcagcctgacctgcctggtcaaaggcttctatcccagcgacatcgccgtggagtgggagagcaatgggcagccggagaacaactacaagaccacgcctcccgtgctggactccgacggctccttcttcctctatagcaagctcaccgtggacaagagcaggtggcagcaggggaacgtcttctcatgctccgtgatgcatgaggctctgcacaaccactacacgcagaagagcctctccctgtctccgggtaaa

SEQ ID NO: 413 - protein, 343 aa, Artificial Sequence
  Description of Artificial Sequence: Synthetic polypeptide
GRGEAETRECIYYNANWELERTNQSGLERCEGEQDKRLHCYASWRNSSGTIELVKKGCWLDDFNCYDRQECVATKENPQVYFCCCEGNFCNERFTHLPEAGGPEVTYEPPPTAPTGGGTHTCPPCPAPELLGGPSVFLFPPKPKDTLMISRTPEVTCVVVDVSHEDPEVKFNWYVDGVEVHNAKTKPREEQYNSTYRVVSVLTVLHQDWLNGKEYKCKVSNKALPAPIEKTISKAKGQPREPQVYTLPPSREEMTKNQVSLTCLVKGFYPSDIAVEWESNGQPENNYKTTPPVLDSDGSFFLYSKLTVDKSRWQQGNVFSCSVMHEALHNHYTQKSLSLSPGK

SEQ ID NO: 414 - protein, 368 aa, Artificial Sequence
  Description of Artificial Sequence: Synthetic polypeptide
MDAMKRGLCCVLLLCGAVFVSPGASGRGEAETRECIYYNANWELERTNQSGLERCEGDQDKRLHCYASWRNSSGTIELVKKGCWLDDDNCYDRQECVATEENPQVYFCCCEGNFCNERFTHLPEAGGPEVTYEPPPTAPTGGGTHTCPPCPAPELLGGPSVFLFPPKPKDTLMISRTPEVTCVVVDVSHEDPEVKFNWYVDGVEVHNAKTKPREEQYNSTYRVVSVLTVLHQDWLNGKEYKCKVSNKALPAPIEKTISKAKGQPREPQVYTLPPSREEMTKNQVSLTCLVKGFYPSDIAVEWESNGQPENNYKTTPPVLDSDGSFFLYSKLTVDKSRWQQGNVFSCSVMHEALHNHYTQKSLSLSPGK

SEQ ID NO: 415 - DNA, 1104 bp, Artificial Sequence
  Description of Artificial Sequence: Synthetic polynucleotide
atggatgcaatgaagagagggctctgctgtgtgctgctgctgtgtggagcagtcttcgtttcgcccggcgcctctgggcgtggggaggctgagacacgggagtgcatctactacaacgccaactgggagctggagcgcaccaaccagagcggcctggagcgctgcgaaggcgaccaggacaagcggctgcactgctacgcctcctggcgcaacagctctggcaccatcgagctcgtgaagaagggctgctggctagatgacgacaactgctacgataggcaggagtgtgtggccactgaggagaacccccaggtgtacttctgctgctgtgaaggcaacttctgcaacgagcgcttcactcatttgccagaggctgggggcccggaagtcacgtacgagccacccccgacagcccccaccggtggtggaactcacacatgcccaccgtgcccagcacctgaactcctggggggaccgtcagtcttcctcttccccccaaaacccaaggacaccctcatgatctcccggacccctgaggtcacatgcgtggtggtggacgtgagccacgaagaccctgaggtcaagttcaactggtacgtggacggcgtggaggtgcataatgccaagacaaagccgcgggaggagcagtacaacagcacgtaccgtgtggtcagcgtcctcaccgtcctgcaccaggactggctgaatggcaaggagtacaagtgcaaggtctccaacaaagccctcccagcccccatcgagaaaaccatctccaaagccaaagggcagccccgagaaccacaggtgtacaccctgcccccatcccgggaggagatgaccaagaaccaggtcagcctgacctgcctggtcaaaggcttctatcccagcgacatcgccgtggagtgggagagcaatgggcagccggagaacaactacaagaccacgcctcccgtgctggactccgacggctccttcttcctctatagcaagctcaccgtggacaagagcaggtggcagcaggggaacgtcttctcatgctccgtgatgcatgaggctctgcacaaccactacacgcagaagagcctctccctgtctccgggtaaa

SEQ ID NO: 416 - protein, 343 aa, Artificial Sequence
  Description of Artificial Sequence: Synthetic polypeptide
GRGEAETRECIYYNANWELERTNQSGLERCEGDQDKRLHCYASWRNSSGTIELVKKGCWLDDDNCYDRQECVATEENPQVYFCCCEGNFCNERFTHLPEAGGPEVTYEPPPTAPTGGGTHTCPPCPAPELLGGPSVFLFPPKPKDTLMISRTPEVTCVVVDVSHEDPEVKFNWYVDGVEVHNAKTKPREEQYNSTYRVVSVLTVLHQDWLNGKEYKCKVSNKALPAPIEKTISKAKGQPREPQVYTLPPSREEMTKNQVSLTCLVKGFYPSDIAVEWESNGQPENNYKTTPPVLDSDGSFFLYSKLTVDKSRWQQGNVFSCSVMHEALHNHYTQKSLSLSPGK

SEQ ID NO: 417 - protein, 368 aa, Artificial Sequence
  Description of Artificial Sequence: Synthetic polypeptide
MDAMKRGLCCVLLLCGAVFVSPGASGRGEAETRECIYYNANWELERTNQSGLERCEGDQDKRLHCYASWRNSSGTIELVKKGCWLDDTNCYDRQECVATEENPQVYFCCCEGNFCNERFTHLPEAGGPEVTYEPPPTAPTGGGTHTCPPCPAPELLGGPSVFLFPPKPKDTLMISRTPEVTCVVVDVSHEDPEVKFNWYVDGVEVHNAKTKPREEQYNSTYRVVSVLTVLHQDWLNGKEYKCKVSNKALPAPIEKTISKAKGQPREPQVYTLPPSREEMTKNQVSLTCLVKGFYPSDIAVEWESNGQPENNYKTTPPVLDSDGSFFLYSKLTVDKSRWQQGNVFSCSVMHEALHNHYTQKSLSLSPGK

SEQ ID NO: 418 - DNA, 1104 bp, Artificial Sequence
  Description of Artificial Sequence: Synthetic polynucleotide
atggatgcaatgaagagagggctctgctgtgtgctgctgctgtgtggagcagtcttcgtttcgcccggcgcctctgggcgtggggaggctgagacacgggagtgcatctactacaacgccaactgggagctggagcgcaccaaccagagcggcctggagcgctgcgaaggcgaccaggacaagcggctgcactgctacgcctcctggcgcaacagctctggcaccatcgagctcgtgaagaagggctgctggctagatgacaccaactgctacgataggcaggagtgtgtggccactgaggagaacccccaggtgtacttctgctgctgtgaaggcaacttctgcaacgagcgcttcactcatttgccagaggctgggggcccggaagtcacgtacgagccacccccgacagcccccaccggtggtggaactcacacatgcccaccgtgcccagcacctgaactcctggggggaccgtcagtcttcctcttccccccaaaacccaaggacaccctcatgatctcccggacccctgaggtcacatgcgtggtggtggacgtgagccacgaagaccctgaggtcaagttcaactggtacgtggacggcgtggaggtgcataatgccaagacaaagccgcgggaggagcagtacaacagcacgtaccgtgtggtcagcgtcctcaccgtcctgcaccaggactggctgaatggcaaggagtacaagtgcaaggtctccaacaaagccctcccagcccccatcgagaaaaccatctccaaagccaaagggcagccccgagaaccacaggtgtacaccctgcccccatcccgggaggagatgaccaagaaccaggtcagcctgacctgcctggtcaaaggcttctatcccagcgacatcgccgtggagtgggagagcaatgggcagccggagaacaactacaagaccacgcctcccgtgctggactccgacggctccttcttcctctatagcaagctcaccgtggacaagagcaggtggcagcaggggaacgtcttctcatgctccgtgatgcatgaggctctgcacaaccactacacgcagaagagcctctccctgtctccgggtaaa

SEQ ID NO: 419 - protein, 343 aa, Artificial Sequence
  Description of Artificial Sequence: Synthetic polypeptide
GRGEAETRECIYYNANWELERTNQSGLERCEGDQDKRLHCYASWRNSSGTIELVKKGCWLDDTNCYDRQECVATEENPQVYFCCCEGNFCNERFTHLPEAGGPEVTYEPPPTAPTGGGTHTCPPCPAPELLGGPSVFLFPPKPKDTLMISRTPEVTCVVVDVSHEDPEVKFNWYVDGVEVHNAKTKPREEQYNSTYRVVSVLTVLHQDWLNGKEYKCKVSNKALPAPIEKTISKAKGQPREPQVYTLPPSREEMTKNQVSLTCLVKGFYPSDIAVEWESNGQPENNYKTTPPVLDSDGSFFLYSKLTVDKSRWQQGNVFSCSVMHEALHNHYTQKSLSLSPGK

SEQ ID NO: 420 - protein, 368 aa, Artificial Sequence
  Description of Artificial Sequence: Synthetic polypeptide
MDAMKRGLCCVLLLCGAVFVSPGASGRGEAETRECIYYNANWELERTNQSGLERCEGEQDKRRHCYASWRNSSGTIELVKKGCWLDDDNCYDRQECVATEENPQVYFCCCEGNFCNERFTHLPEAGGPEVTYEPPPTAPTGGGTHTCPPCPAPELLGGPSVFLFPPKPKDTLMISRTPEVTCVVVDVSHEDPEVKFNWYVDGVEVHNAKTKPREEQYNSTYRVVSVLTVLHQDWLNGKEYKCKVSNKALPAPIEKTISKAKGQPREPQVYTLPPSREEMTKNQVSLTCLVKGFYPSDIAVEWESNGQPENNYKTTPPVLDSDGSFFLYSKLTVDKSRWQQGNVFSCSVMHEALHNHYTQKSLSLSPGK

SEQ ID NO: 421 - DNA, 1104 bp, Artificial Sequence
  Description of Artificial Sequence: Synthetic polynucleotide
atggatgcaatgaagagagggctctgctgtgtgctgctgctgtgtggagcagtcttcgtttcgcccggcgcctctgggcgtggggaggctgagacacgggagtgcatctactacaacgccaactgggagctggagcgcaccaaccagagcggcctggagcgctgcgaaggcgagcaggacaagcggaggcactgctacgcctcctggcgcaacagctctggcaccatcgagctcgtgaagaagggctgctggctagatgacgacaactgctacgataggcaggagtgtgtggccactgaggagaacccccaggtgtacttctgctgctgtgaaggcaacttctgcaacgagcgcttcactcatttgccagaggctgggggcccggaagtcacgtacgagccacccccgacagcccccaccggtggtggaactcacacatgcccaccgtgcccagcacctgaactcctggggggaccgtcagtcttcctcttccccccaaaacccaaggacaccctcatgatctcccggacccctgaggtcacatgcgtggtggtggacgtgagccacgaagaccctgaggtcaagttcaactggtacgtggacggcgtggaggtgcataatgccaagacaaagccgcgggaggagcagtacaacagcacgtaccgtgtggtcagcgtcctcaccgtcctgcaccaggactggctgaatggcaaggagtacaagtgcaaggtctccaacaaagccctcccagcccccatcgagaaaaccatctccaaagccaaagggcagccccgagaaccacaggtgtacaccctgcccccatcccgggaggagatgaccaagaaccaggtcagcctgacctgcctggtcaaaggcttctatcccagcgacatcgccgtggagtgggagagcaatgggcagccggagaacaactacaagaccacgcctcccgtgctggactccgacggctccttcttcctctatagcaagctcaccgtggacaagagcaggtggcagcaggggaacgtcttctcatgctccgtgatgcatgaggctctgcacaaccactacacgcagaagagcctctccctgtctccgggtaaa

SEQ ID NO: 422 - protein, 343 aa, Artificial Sequence
  Description of Artificial Sequence: Synthetic polypeptide
GRGEAETRECIYYNANWELERTNQSGLERCEGEQDKRRHCYASWRNSSGTIELVKKGCWLDDDNCYDRQECVATEENPQVYFCCCEGNFCNERFTHLPEAGGPEVTYEPPPTAPTGGGTHTCPPCPAPELLGGPSVFLFPPKPKDTLMISRTPEVTCVVVDVSHEDPEVKFNWYVDGVEVHNAKTKPREEQYNSTYRVVSVLTVLHQDWLNGKEYKCKVSNKALPAPIEKTISKAKGQPREPQVYTLPPSREEMTKNQVSLTCLVKGFYPSDIAVEWESNGQPENNYKTTPPVLDSDGSFFLYSKLTVDKSRWQQGNVFSCSVMHEALHNHYTQKSLSLSPGK

SEQ ID NO: 423 - protein, 368 aa, Artificial Sequence
  Description of Artificial Sequence: Synthetic polypeptide
MDAMKRGLCCVLLLCGAVFVSPGASGRGEAETRECIYYNANWELERTNQSGLERCEGEQDKRRHCYASWRNSSGTIELVKKGCWLDDSNCYDRQECVATEENPQVYFCCCEGNFCNERFTHLPEAGGPEVTYEPPPTAPTGGGTHTCPPCPAPELLGGPSVFLFPPKPKDTLMISRTPEVTCVVVDVSHEDPEVKFNWYVDGVEVHNAKTKPREEQYNSTYRVVSVLTVLHQDWLNGKEYKCKVSNKALPAPIEKTISKAKGQPREPQVYTLPPSREEMTKNQVSLTCLVKGFYPSDIAVEWESNGQPENNYKTTPPVLDSDGSFFLYSKLTVDKSRWQQGNVFSCSVMHEALHNHYTQKSLSLSPGK

SEQ ID NO: 424 - DNA, 1104 bp, Artificial Sequence
  Description of Artificial Sequence: Synthetic polynucleotide
atggatgcaatgaagagagggctctgctgtgtgctgctgctgtgtggagcagtcttcgtttcgcccggcgcctctgggcgtggggaggctgagacacgggagtgcatctactacaacgccaactgggagctggagcgcaccaaccagagcggcctggagcgctgcgaaggcgagcaggacaagcggaggcactgctacgcctcctggcgcaacagctctggcaccatcgagctcgtgaagaagggctgctggctagatgactccaactgctacgataggcaggagtgtgtggccactgaggagaacccccaggtgtacttctgctgctgtgaaggcaacttctgcaacgagcgcttcactcatttgccagaggctgggggcccggaagtcacgtacgagccacccccgacagcccccaccggtggtggaactcacacatgcccaccgtgcccagcacctgaactcctggggggaccgtcagtcttcctcttccccccaaaacccaaggacaccctcatgatctcccggacccctgaggtcacatgcgtggtggtggacgtgagccacgaagaccctgaggtcaagttcaactggtacgtggacggcgtggaggtgcataatgccaagacaaagccgcgggaggagcagtacaacagcacgtaccgtgtggtcagcgtcctcaccgtcctgcaccaggactggctgaatggcaaggagtacaagtgcaaggtctccaacaaagccctcccagcccccatcgagaaaaccatctccaaagccaaagggcagccccgagaaccacaggtgtacaccctgcccccatcccgggaggagatgaccaagaaccaggtcagcctgacctgcctggtcaaaggcttctatcccagcgacatcgccgtggagtgggagagcaatgggcagccggagaacaactacaagaccacgcctcccgtgctggactccgacggctccttcttcctctatagcaagctcaccgtggacaagagcaggtggcagcaggggaacgtcttctcatgctccgtgatgcatgaggctctgcacaaccactacacgcagaagagcctctccctgtctccgggtaaa

SEQ ID NO: 425 - protein, 343 aa, Artificial Sequence
  Description of Artificial Sequence: Synthetic polypeptide
GRGEAETRECIYYNANWELERTNQSGLERCEGEQDKRRHCYASWRNSSGTIELVKKGCWLDDSNCYDRQECVATEENPQVYFCCCEGNFCNERFTHLPEAGGPEVTYEPPPTAPTGGGTHTCPPCPAPELLGGPSVFLFPPKPKDTLMISRTPEVTCVVVDVSHEDPEVKFNWYVDGVEVHNAKTKPREEQYNSTYRVVSVLTVLHQDWLNGKEYKCKVSNKALPAPIEKTISKAKGQPREPQVYTLPPSREEMTKNQVSLTCLVKGFYPSDIAVEWESNGQPENNYKTTPPVLDSDGSFFLYSKLTVDKSRWQQGNVFSCSVMHEALHNHYTQKSLSLSPGK

SEQ ID NO: 426 - protein, 368 aa, Artificial Sequence
  Description of Artificial Sequence: Synthetic polypeptide
MDAMKRGLCCVLLLCGAVFVSPGASGRGEAETRECIYYNANWELERTNQSGLERCEGEQDKRRHCYASWRNSSGTIELVKKGCWLDDTNCYDRQECVATEENPQVYFCCCEGNFCNERFTHLPEAGGPEVTYEPPPTAPTGGGTHTCPPCPAPELLGGPSVFLFPPKPKDTLMISRTPEVTCVVVDVSHEDPEVKFNWYVDGVEVHNAKTKPREEQYNSTYRVVSVLTVLHQDWLNGKEYKCKVSNKALPAPIEKTISKAKGQPREPQVYTLPPSREEMTKNQVSLTCLVKGFYPSDIAVEWESNGQPENNYKTTPPVLDSDGSFFLYSKLTVDKSRWQQGNVFSCSVMHEALHNHYTQKSLSLSPGK

SEQ ID NO: 427 - DNA, 1104 bp, Artificial Sequence
  Description of Artificial Sequence: Synthetic polynucleotide
atggatgcaatgaagagagggctctgctgtgtgctgctgctgtgtggagcagtcttcgtttcgcccggcgcctctgggcgtggggaggctgagacacgggagtgcatctactacaacgccaactgggagctggagcgcaccaaccagagcggcctggagcgctgcgaaggcgagcaggacaagcggcggcactgctacgcctcctggcgcaacagctctggcaccatcgagctcgtgaagaagggctgctggctagatgacaccaactgctacgataggcaggagtgtgtggccactgaggagaacccccaggtgtacttctgctgctgtgaaggcaacttctgcaacgagcgcttcactcatttgccagaggctgggggcccggaagtcacgtacgagccacccccgacagcccccaccggtggtggaactcacacatgcccaccgtgcccagcacctgaactcctggggggaccgtcagtcttcctcttccccccaaaacccaaggacaccctcatgatctcccggacccctgaggtcacatgcgtggtggtggacgtgagccacgaagaccctgaggtcaagttcaactggtacgtggacggcgtggaggtgcataatgccaagacaaagccgcgggaggagcagtacaacagcacgtaccgtgtggtcagcgtcctcaccgtcctgcaccaggactggctgaatggcaaggagtacaagtgcaaggtctccaacaaagccctcccagcccccatcgagaaaaccatctccaaagccaaagggcagccccgagaaccacaggtgtacaccctgcccccatcccgggaggagatgaccaagaaccaggtcagcctgacctgcctggtcaaaggcttctatcccagcgacatcgccgtggagtgggagagcaatgggcagccggagaacaactacaagaccacgcctcccgtgctggactccgacggctccttcttcctctatagcaagctcaccgtggacaagagcaggtggcagcaggggaacgtcttctcatgctccgtgatgcatgaggctctgcacaaccactacacgcagaagagcctctccctgtctccgggtaaa

SEQ ID NO: 428 - protein, 343 aa, Artificial Sequence
  Description of Artificial Sequence: Synthetic polypeptide
GRGEAETRECIYYNANWELERTNQSGLERCEGEQDKRRHCYASWRNSSGTIELVKKGCWLDDTNCYDRQECVATEENPQVYFCCCEGNFCNERFTHLPEAGGPEVTYEPPPTAPTGGGTHTCPPCPAPELLGGPSVFLFPPKPKDTLMISRTPEVTCVVVDVSHEDPEVKFNWYVDGVEVHNAKTKPREEQYNSTYRVVSVLTVLHQDWLNGKEYKCKVSNKALPAPIEKTISKAKGQPREPQVYTLPPSREEMTKNQVSLTCLVKGFYPSDIAVEWESNGQPENNYKTTPPVLDSDGSFFLYSKLTVDKSRWQQGNVFSCSVMHEALHNHYTQKSLSLSPGK

SEQ ID NO: 429 - protein, 368 aa, Artificial Sequence
  Description of Artificial Sequence: Synthetic polypeptide
MDAMKRGLCCVLLLCGAVFVSPGASGRGEAETRECIYYNANWELERTNQSGLERCEGEQDKRLHCYASWRNSSGTIELVKKGCWFDDDNCYDRQECVATEENPQVYFCCCEGNFCNERFTHLPEAGGPEVTYEPPPTAPTGGGTHTCPPCPAPELLGGPSVFLFPPKPKDTLMISRTPEVTCVVVDVSHEDPEVKFNWYVDGVEVHNAKTKPREEQYNSTYRVVSVLTVLHQDWLNGKEYKCKVSNKALPAPIEKTISKAKGQPREPQVYTLPPSREEMTKNQVSLTCLVKGFYPSDIAVEWESNGQPENNYKTTPPVLDSDGSFFLYSKLTVDKSRWQQGNVFSCSVMHEALHNHYTQKSLSLSPGK

SEQ ID NO: 430 - DNA, 1104 bp, Artificial Sequence
  Description of Artificial Sequence: Synthetic polynucleotide
atggatgcaatgaagagagggctctgctgtgtgctgctgctgtgtggagcagtcttcgtttcgcccggcgcctctgggcgtggggaggctgagacacgggagtgcatctactacaacgccaactgggagctggagcgcaccaaccagagcggcctggagcgctgcgaaggcgagcaggacaagcggctgcactgctacgcctcctggcgcaacagctctggcaccatcgagctcgtgaagaagggctgctggttcgatgacgacaactgctacgataggcaggagtgtgtggccactgaggagaacccccaggtgtacttctgctgctgtgaaggcaacttctgcaacgagcgcttcactcatttgccagaggctgggggcccggaagtcacgtacgagccacccccgacagcccccaccggtggtggaactcacacatgcccaccgtgcccagcacctgaactcctggggggaccgtcagtcttcctcttccccccaaaacccaaggacaccctcatgatctcccggacccctgaggtcacatgcgtggtggtggacgtgagccacgaagaccctgaggtcaagttcaactggtacgtggacggcgtggaggtgcataatgccaagacaaagccgcgggaggagcagtacaacagcacgtaccgtgtggtcagcgtcctcaccgtcctgcaccaggactggctgaatggcaaggagtacaagtgcaaggtctccaacaaagccctcccagcccccatcgagaaaaccatctccaaagccaaagggcagccccgagaaccacaggtgtacaccctgcccccatcccgggaggagatgaccaagaaccaggtcagcctgacctgcctggtcaaaggcttctatcccagcgacatcgccgtggagtgggagagcaatgggcagccggagaacaactacaagaccacgcctcccgtgctggactccgacggctccttcttcctctatagcaagctcaccgtggacaagagcaggtggcagcaggggaacgtcttctcatgctccgtgatgcatgaggctctgcacaaccactacacgcagaagagcctctccctgtctccgggtaaa

SEQ ID NO: 431 - protein, 343 aa, Artificial Sequence
  Description of Artificial Sequence: Synthetic polypeptide
GRGEAETRECIYYNANWELERTNQSGLERCEGEQDKRLHCYASWRNSSGTIELVKKGCWFDDDNCYDRQECVATEENPQVYFCCCEGNFCNERFTHLPEAGGPEVTYEPPPTAPTGGGTHTCPPCPAPELLGGPSVFLFPPKPKDTLMISRTPEVTCVVVDVSHEDPEVKFNWYVDGVEVHNAKTKPREEQYNSTYRVVSVLTVLHQDWLNGKEYKCKVSNKALPAPIEKTISKAKGQPREPQVYTLPPSREEMTKNQVSLTCLVKGFYPSDIAVEWESNGQPENNYKTTPPVLDSDGSFFLYSKLTVDKSRWQQGNVFSCSVMHEALHNHYTQKSLSLSPGK

SEQ ID NO: 432 - protein, 368 aa, Artificial Sequence
  Description of Artificial Sequence: Synthetic polypeptide
MDAMKRGLCCVLLLCGAVFVSPGASGRGEAETRECIYYNANWELERTNQSGLERCEGEQDKRLHCYASWRNSSGTIELVKKGCWFDDTNCYDRQECVATEENPQVYFCCCEGNFCNERFTHLPEAGGPEVTYEPPPTAPTGGGTHTCPPCPAPELLGGPSVFLFPPKPKDTLMISRTPEVTCVVVDVSHEDPEVKFNWYVDGVEVHNAKTKPREEQYNSTYRVVSVLTVLHQDWLNGKEYKCKVSNKALPAPIEKTISKAKGQPREPQVYTLPPSREEMTKNQVSLTCLVKGFYPSDIAVEWESNGQPENNYKTTPPVLDSDGSFFLYSKLTVDKSRWQQGNVFSCSVMHEALHNHYTQKSLSLSPGK

SEQ ID NO: 433 - DNA, 1104 bp, Artificial Sequence
  Description of Artificial Sequence: Synthetic polynucleotide
atggatgcaatgaagagagggctctgctgtgtgctgctgctgtgtggagcagtcttcgtttcgcccggcgcctctgggcgtggggaggctgagacacgggagtgcatctactacaacgccaactgggagctggagcgcaccaaccagagcggcctggagcgctgcgaaggcgagcaggacaagcggctgcactgctacgcctcctggcgcaacagctctggcaccatcgagctcgtgaagaagggctgctggttcgatgacaccaactgctacgataggcaggagtgtgtggccactgaggagaacccccaggtgtacttctgctgctgtgaaggcaacttctgcaacgagcgcttcactcatttgccagaggctgggggcccggaagtcacgtacgagccacccccgacagcccccaccggtggtggaactcacacatgcccaccgtgcccagcacctgaactcctggggggaccgtcagtcttcctcttccccccaaaacccaaggacaccctcatgatctcccggacccctgaggtcacatgcgtggtggtggacgtgagccacgaagaccctgaggtcaagttcaactggtacgtggacggcgtggaggtgcataatgccaagacaaagccgcgggaggagcagtacaacagcacgtaccgtgtggtcagcgtcctcaccgtcctgcaccaggactggctgaatggcaaggagtacaagtgcaaggtctccaacaaagccctcccagcccccatcgagaaaaccatctccaaagccaaagggcagccccgagaaccacaggtgtacaccctgcccccatcccgggaggagatgaccaagaaccaggtcagcctgacctgcctggtcaaaggcttctatcccagcgacatcgccgtggagtgggagagcaatgggcagccggagaacaactacaagaccacgcctcccgtgctggactccgacggctccttcttcctctatagcaagctcaccgtggacaagagcaggtggcagcaggggaacgtcttctcatgctccgtgatgcatgaggctctgcacaaccactacacgcagaagagcctctccctgtctccgggtaaa

SEQ ID NO: 434 - protein, 343 aa, Artificial Sequence
  Description of Artificial Sequence: Synthetic polypeptide
GRGEAETRECIYYNANWELERTNQSGLERCEGEQDKRLHCYASWRNSSGTIELVKKGCWFDDTNCYDRQECVATEENPQVYFCCCEGNFCNERFTHLPEAGGPEVTYEPPPTAPTGGGTHTCPPCPAPELLGGPSVFLFPPKPKDTLMISRTPEVTCVVVDVSHEDPEVKFNWYVDGVEVHNAKTKPREEQYNSTYRVVSVLTVLHQDWLNGKEYKCKVSNKALPAPIEKTISKAKGQPREPQVYTLPPSREEMTKNQVSLTCLVKGFYPSDIAVEWESNGQPENNYKTTPPVLDSDGSFFLYSKLTVDKSRWQQGNVFSCSVMHEALHNHYTQKSLSLSPGK

SEQ ID NO: 435 - protein, 368 aa, Artificial Sequence
  Description of Artificial Sequence: Synthetic polypeptide
MDAMKRGLCCVLLLCGAVFVSPGASGRGEAETRECIYYNANWELERTNQSGLERCEGEQDKRLHCYASWRNSSGTIELVKKGCWLDDDRCYDRQECVATEENPQVYFCCCEGNFCNERFTHLPEAGGPEVTYEPPPTAPTGGGTHTCPPCPAPELLGGPSVFLFPPKPKDTLMISRTPEVTCVVVDVSHEDPEVKFNWYVDGVEVHNAKTKPREEQYNSTYRVVSVLTVLHQDWLNGKEYKCKVSNKALPAPIEKTISKAKGQPREPQVYTLPPSREEMTKNQVSLTCLVKGFYPSDIAVEWESNGQPENNYKTTPPVLDSDGSFFLYSKLTVDKSRWQQGNVFSCSVMHEALHNHYTQKSLSLSPGK

SEQ ID NO: 436 - DNA, 1104 bp, Artificial Sequence
  Description of Artificial Sequence: Synthetic polynucleotide
atggatgcaatgaagagagggctctgctgtgtgctgctgctgtgtggagcagtcttcgtttcgcccggcgcctctgggcgtggggaggctgagacacgggagtgcatctactacaacgccaactgggagctggagcgcaccaaccagagcggcctggagcgctgcgaaggcgagcaggacaagcggctgcactgctacgcctcctggcgcaacagctctggcaccatcgagctcgtgaagaagggctgctggctagatgacgaccggtgctacgataggcaggagtgtgtggccactgaggagaacccccaggtgtacttctgctgctgtgaaggcaacttctgcaacgagcgcttcactcatttgccagaggctgggggcccggaagtcacgtacgagccacccccgacagcccccaccggtggtggaactcacacatgcccaccgtgcccagcacctgaactcctggggggaccgtcagtcttcctcttccccccaaaacccaaggacaccctcatgatctcccggacccctgaggtcacatgcgtggtggtggacgtgagccacgaagaccctgaggtcaagttcaactggtacgtggacggcgtggaggtgcataatgccaagacaaagccgcgggaggagcagtacaacagcacgtaccgtgtggtcagcgtcctcaccgtcctgcaccaggactggctgaatggcaaggagtacaagtgcaaggtctccaacaaagccctcccagcccccatcgagaaaaccatctccaaagccaaagggcagccccgagaaccacaggtgtacaccctgcccccatcccgggaggagatgaccaagaaccaggtcagcctgacctgcctggtcaaaggcttctatcccagcgacatcgccgtggagtgggagagcaatgggcagccggagaacaactacaagaccacgcctcccgtgctggactccgacggctccttcttcctctatagcaagctcaccgtggacaagagcaggtggcagcaggggaacgtcttctcatgctccgtgatgcatgaggctctgcacaaccactacacgcagaagagcctctccctgtctccgggtaaa

SEQ ID NO: 437 - protein, 343 aa, Artificial Sequence
  Description of Artificial Sequence: Synthetic polypeptide
GRGEAETRECIYYNANWELERTNQSGLERCEGEQDKRLHCYASWRNSSGTIELVKKGCWLDDDRCYDRQECVATEENPQVYFCCCEGNFCNERFTHLPEAGGPEVTYEPPPTAPTGGGTHTCPPCPAPELLGGPSVFLFPPKPKDTLMISRTPEVTCVVVDVSHEDPEVKFNWYVDGVEVHNAKTKPREEQYNSTYRVVSVLTVLHQDWLNGKEYKCKVSNKALPAPIEKTISKAKGQPREPQVYTLPPSREEMTKNQVSLTCLVKGFYPSDIAVEWESNGQPENNYKTTPPVLDSDGSFFLYSKLTVDKSRWQQGNVFSCSVMHEALHNHYTQKSLSLSPGK

SEQ ID NO: 438 - protein, 368 aa, Artificial Sequence
  Description of Artificial Sequence: Synthetic polypeptide
MDAMKRGLCCVLLLCGAVFVSPGASGRGEAETRECIYYNANWELERTNQSGLERCEGEQDKRLHCYASWRNSSGTIELVKKGCWLDDERCYDRQECVATEENPQVYFCCCEGNFCNERFTHLPEAGGPEVTYEPPPTAPTGGGTHTCPPCPAPELLGGPSVFLFPPKPKDTLMISRTPEVTCVVVDVSHEDPEVKFNWYVDGVEVHNAKTKPREEQYNSTYRVVSVLTVLHQDWLNGKEYKCKVSNKALPAPIEKTISKAKGQPREPQVYTLPPSREEMTKNQVSLTCLVKGFYPSDIAVEWESNGQPENNYKTTPPVLDSDGSFFLYSKLTVDKSRWQQGNVFSCSVMHEALHNHYTQKSLSLSPGK

SEQ ID NO: 439 - DNA, 1104 bp, Artificial Sequence
  Description of Artificial Sequence: Synthetic polynucleotide
atggatgcaatgaagagagggctctgctgtgtgctgctgctgtgtggagcagtcttcgtttcgcccggcgcctctgggcgtggggaggctgagacacgggagtgcatctactacaacgccaactgggagctggagcgcaccaaccagagcggcctggagcgctgcgaaggcgagcaggacaagcggctgcactgctacgcctcctggcgcaacagctctggcaccatcgagctcgtgaagaagggctgctggctagatgacgagcggtgctacgataggcaggagtgtgtggccactgaggagaacccccaggtgtacttctgctgctgtgaaggcaacttctgcaacgagcgcttcactcatttgccagaggctgggggcccggaagtcacgtacgagccacccccgacagcccccaccggtggtggaactcacacatgcccaccgtgcccagcacctgaactcctggggggaccgtcagtcttcctcttccccccaaaacccaaggacaccctcatgatctcccggacccctgaggtcacatgcgtggtggtggacgtgagccacgaagaccctgaggtcaagttcaactggtacgtggacggcgtggaggtgcataatgccaagacaaagccgcgggaggagcagtacaacagcacgtaccgtgtggtcagcgtcctcaccgtcctgcaccaggactggctgaatggcaaggagtacaagtgcaaggtctccaacaaagccctcccagcccccatcgagaaaaccatctccaaagccaaagggcagccccgagaaccacaggtgtacaccctgcccccatcccgggaggagatgaccaagaaccaggtcagcctgacctgcctggtcaaaggcttctatcccagcgacatcgccgtggagtgggagagcaatgggcagccggagaacaactacaagaccacgcctcccgtgctggactccgacggctccttcttcctctatagcaagctcaccgtggacaagagcaggtggcagcaggggaacgtcttctcatgctccgtgatgcatgaggctctgcacaaccactacacgcagaagagcctctccctgtctccgggtaaa

SEQ ID NO: 440 - protein, 343 aa, Artificial Sequence
  Description of Artificial Sequence: Synthetic polypeptide
GRGEAETRECIYYNANWELERTNQSGLERCEGEQDKRLHCYASWRNSSGTIELVKKGCWLDDERCYDRQECVATEENPQVYFCCCEGNFCNERFTHLPEAGGPEVTYEPPPTAPTGGGTHTCPPCPAPELLGGPSVFLFPPKPKDTLMISRTPEVTCVVVDVSHEDPEVKFNWYVDGVEVHNAKTKPREEQYNSTYRVVSVLTVLHQDWLNGKEYKCKVSNKALPAPIEKTISKAKGQPREPQVYTLPPSREEMTKNQVSLTCLVKGFYPSDIAVEWESNGQPENNYKTTPPVLDSDGSFFLYSKLTVDKSRWQQGNVFSCSVMHEALHNHYTQKSLSLSPGK

SEQ ID NO: 441 - protein, 368 aa, Artificial Sequence
  Description of Artificial Sequence: Synthetic polypeptide
MDAMKRGLCCVLLLCGAVFVSPGASGRGEAETRECIYYNANWELERTNQSGLERCEGEQDKRLHCYASWRNSSGTIELVKKGCWLDDSRCYDRQECVATEENPQVYFCCCEGNFCNERFTHLPEAGGPEVTYEPPPTAPTGGGTHTCPPCPAPELLGGPSVFLFPPKPKDTLMISRTPEVTCVVVDVSHEDPEVKFNWYVDGVEVHNAKTKPREEQYNSTYRVVSVLTVLHQDWLNGKEYKCKVSNKALPAPIEKTISKAKGQPREPQVYTLPPSREEMTKNQVSLTCLVKGFYPSDIAVEWESNGQPENNYKTTPPVLDSDGSFFLYSKLTVDKSRWQQGNVFSCSVMHEALHNHYTQKSLSLSPGK

SEQ ID NO: 442 - DNA, 1104 bp, Artificial Sequence
  Description of Artificial Sequence: Synthetic polynucleotide
atggatgcaatgaagagagggctctgctgtgtgctgctgctgtgtggagcagtcttcgtttcgcccggcgcctctgggcgtggggaggctgagacacgggagtgcatctactacaacgccaactgggagctggagcgcaccaaccagagcggcctggagcgctgcgaaggcgagcaggacaagcggctgcactgctacgcctcctggcgcaacagctctggcaccatcgagctcgtgaagaagggctgctggctagatgactcccggtgctacgataggcaggagtgtgtggccactgaggagaacccccaggtgtacttctgctgctgtgaaggcaacttctgcaacgagcgcttcactcatttgccagaggctgggggcccggaagtcacgtacgagccacccccgacagcccccaccggtggtggaactcacacatgcccaccgtgcccagcacctgaactcctggggggaccgtcagtcttcctcttccccccaaaacccaaggacaccctcatgatctcccggacccctgaggtcacatgcgtggtggtggacgtgagccacgaagaccctgaggtcaagttcaactggtacgtggacggcgtggaggtgcataatgccaagacaaagccgcgggaggagcagtacaacagcacgtaccgtgtggtcagcgtcctcaccgtcctgcaccaggactggctgaatggcaaggagtacaagtgcaaggtctccaacaaagccctcccagcccccatcgagaaaaccatctccaaagccaaagggcagccccgagaaccacaggtgtacaccctgcccccatcccgggaggagatgaccaagaaccaggtcagcctgacctgcctggtcaaaggcttctatcccagcgacatcgccgtggagtgggagagcaatgggcagccggagaacaactacaagaccacgcctcccgtgctggactccgacggctccttcttcctctatagcaagctcaccgtggacaagagcaggtggcagcaggggaacgtcttctcatgctccgtgatgcatgaggctctgcacaaccactacacgcagaagagcctctccctgtctccgggtaaa

SEQ ID NO: 443 - protein, 343 aa, Artificial Sequence
  Description of Artificial Sequence: Synthetic polypeptide
GRGEAETRECIYYNANWELERTNQSGLERCEGEQDKRLHCYASWRNSSGTIELVKKGCWLDDSRCYDRQECVATEENPQVYFCCCEGNFCNERFTHLPEAGGPEVTYEPPPTAPTGGGTHTCPPCPAPELLGGPSVFLFPPKPKDTLMISRTPEVTCVVVDVSHEDPEVKFNWYVDGVEVHNAKTKPREEQYNSTYRVVSVLTVLHQDWLNGKEYKCKVSNKALPAPIEKTISKAKGQPREPQVYTLPPSREEMTKNQVSLTCLVKGFYPSDIAVEWESNGQPENNYKTTPPVLDSDGSFFLYSKLTVDKSRWQQGNVFSCSVMHEALHNHYTQKSLSLSPGK

SEQ ID NO: 444 - protein, 368 aa, Artificial Sequence
  Description of Artificial Sequence: Synthetic polypeptide
MDAMKRGLCCVLLLCGAVFVSPGASGRGEAETRECIYYNANWELERTNQSGLERCEGEQDKRLHCYASWRNSSGTIELVKKGCWLDDWACYDRQECVATEENPQVYFCCCEGNFCNERFTHLPEAGGPEVTYEPPPTAPTGGGTHTCPPCPAPELLGGPSVFLFPPKPKDTLMISRTPEVTCVVVDVSHEDPEVKFNWYVDGVEVHNAKTKPREEQYNSTYRVVSVLTVLHQDWLNGKEYKCKVSNKALPAPIEKTISKAKGQPREPQVYTLPPSREEMTKNQVSLTCLVKGFYPSDIAVEWESNGQPENNYKTTPPVLDSDGSFFLYSKLTVDKSRWQQGNVFSCSVMHEALHNHYTQKSLSLSPGK

SEQ ID NO: 445 - DNA, 1104 bp, Artificial Sequence
  Description of Artificial Sequence: Synthetic polynucleotide
atggatgcaatgaagagagggctctgctgtgtgctgctgctgtgtggagcagtcttcgtttcgcccggcgcctctgggcgtggggaggctgagacacgggagtgcatctactacaacgccaactgggagctggagcgcaccaaccagagcggcctggagcgctgcgaaggcgagcaggacaagcggctgcactgctacgcctcctggcgcaacagctctggcaccatcgagctcgtgaagaagggctgctggctagatgactgggcctgctacgataggcaggagtgtgtggccactgaggagaacccccaggtgtacttctgctgctgtgaaggcaacttctgcaacgagcgcttcactcatttgccagaggctgggggcccggaagtcacgtacgagccacccccgacagcccccaccggtggtggaactcacacatgcccaccgtgcccagcacctgaactcctggggggaccgtcagtcttcctcttccccccaaaacccaaggacaccctcatgatctcccggacccctgaggtcacatgcgtggtggtggacgtgagccacgaagaccctgaggtcaagttcaactggtacgtggacggcgtggaggtgcataatgccaagacaaagccgcgggaggagcagtacaacagcacgtaccgtgtggtcagcgtcctcaccgtcctgcaccaggactggctgaatggcaaggagtacaagtgcaaggtctccaacaaagccctcccagcccccatcgagaaaaccatctccaaagccaaagggcagccccgagaaccacaggtgtacaccctgcccccatcccgggaggagatgaccaagaaccaggtcagcctgacctgcctggtcaaaggcttctatcccagcgacatcgccgtggagtgggagagcaatgggcagccggagaacaactacaagaccacgcctcccgtgctggactccgacggctccttcttcctctatagcaagctcaccgtggacaagagcaggtggcagcaggggaacgtcttctcatgctccgtgatgcatgaggctctgcacaaccactacacgcagaagagcctctccctgtctccgggtaaa

SEQ ID NO: 446 - protein, 343 aa, Artificial Sequence
  Description of Artificial Sequence: Synthetic polypeptide
GRGEAETRECIYYNANWELERTNQSGLERCEGEQDKRLHCYASWRNSSGTIELVKKGCWLDDWACYDRQECVATEENPQVYFCCCEGNFCNERFTHLPEAGGPEVTYEPPPTAPTGGGTHTCPPCPAPELLGGPSVFLFPPKPKDTLMISRTPEVTCVVVDVSHEDPEVKFNWYVDGVEVHNAKTKPREEQYNSTYRVVSVLTVLHQDWLNGKEYKCKVSNKALPAPIEKTISKAKGQPREPQVYTLPPSREEMTKNQVSLTCLVKGFYPSDIAVEWESNGQPENNYKTTPPVLDSDGSFFLYSKLTVDKSRWQQGNVFSCSVMHEALHNHYTQKSLSLSPGK

SEQ ID NO: 447 - protein, 368 aa, Artificial Sequence
  Description of Artificial Sequence: Synthetic polypeptide
MDAMKRGLCCVLLLCGAVFVSPGASGRGEAETRECIYYNANWELERTNQSGLERCEGEQDKRLHCYASWRNSSGTIELVKKGCWLDDINCYDRQECVATKENPQVYFCCCEGNFCNERFTHLPEAGGPEVTYEPPPTAPTGGGTHTCPPCPAPELLGGPSVFLFPPKPKDTLMISRTPEVTCVVVDVSHEDPEVKFNWYVDGVEVHNAKTKPREEQYNSTYRVVSVLTVLHQDWLNGKEYKCKVSNKALPAPIEKTISKAKGQPREPQVYTLPPSREEMTKNQVSLTCLVKGFYPSDIAVEWESNGQPENNYKTTPPVLDSDGSFFLYSKLTVDKSRWQQGNVFSCSVMHEALHNHYTQKSLSLSPGK

SEQ ID NO: 448 - DNA, 1104 bp, Artificial Sequence
  Description of Artificial Sequence: Synthetic polynucleotide
atggatgcaatgaagagagggctctgctgtgtgctgctgctgtgtggagcagtcttcgtttcgcccggcgcctctgggcgtggggaggctgagacacgggagtgcatctactacaacgccaactgggagctggagcgcaccaaccagagcggcctggagcgctgcgaaggcgagcaggacaagcggctgcactgctacgcctcctggcgcaacagctctggcaccatcgagctcgtgaagaagggctgctggctagatgacatcaactgctacgataggcaggagtgtgtggccactaaggagaacccccaggtgtacttctgctgctgtgaaggcaacttctgcaacgagcgcttcactcatttgccagaggctgggggcccggaagtcacgtacgagccacccccgacagcccccaccggtggtggaactcacacatgcccaccgtgcccagcacctgaactcctggggggaccgtcagtcttcctcttccccccaaaacccaaggacaccctcatgatctcccggacccctgaggtcacatgcgtggtggtggacgtgagccacgaagaccctgaggtcaagttcaactggtacgtggacggcgtggaggtgcataatgccaagacaaagccgcgggaggagcagtacaacagcacgtaccgtgtggtcagcgtcctcaccgtcctgcaccaggactggctgaatggcaaggagtacaagtgcaaggtctccaacaaagccctcccagcccccatcgagaaaaccatctccaaagccaaagggcagccccgagaaccacaggtgtacaccctgcccccatcccgggaggagatgaccaagaaccaggtcagcctgacctgcctggtcaaaggcttctatcccagcgacatcgccgtggagtgggagagcaatgggcagccggagaacaactacaagaccacgcctcccgtgctggactccgacggctccttcttcctctatagcaagctcaccgtggacaagagcaggtggcagcaggggaacgtcttctcatgctccgtgatgcatgaggctctgcacaaccactacacgcagaagagcctctccctgtctccgggtaaa

SEQ ID NO: 449 - protein, 343 aa, Artificial Sequence
  Description of Artificial Sequence: Synthetic polypeptide
GRGEAETRECIYYNANWELERTNQSGLERCEGEQDKRLHCYASWRNSSGTIELVKKGCWLDDINCYDRQECVATKENPQVYFCCCEGNFCNERFTHLPEAGGPEVTYEPPPTAPTGGGTHTCPPCPAPELLGGPSVFLFPPKPKDTLMISRTPEVTCVVVDVSHEDPEVKFNWYVDGVEVHNAKTKPREEQYNSTYRVVSVLTVLHQDWLNGKEYKCKVSNKALPAPIEKTISKAKGQPREPQVYTLPPSREEMTKNQVSLTCLVKGFYPSDIAVEWESNGQPENNYKTTPPVLDSDGSFFLYSKLTVDKSRWQQGNVFSCSVMHEALHNHYTQKSLSLSPGK

SEQ ID NO: 450 - protein, 368 aa, Artificial Sequence
  Description of Artificial Sequence: Synthetic polypeptide
MDAMKRGLCCVLLLCGAVFVSPGASGRGEAETRECIYYNANWELERTNQSGLERCLGEQDKRLHCYASWRNSSGTIELVKKGCWLDDDRCYDRQECVATEENPQVYFCCCEGNFCNERFTHLPEAGGPEVTYEPPPTAPTGGGTHTCPPCPAPELLGGPSVFLFPPKPKDTLMISRTPEVTCVVVDVSHEDPEVKFNWYVDGVEVHNAKTKPREEQYNSTYRVVSVLTVLHQDWLNGKEYKCKVSNKALPAPIEKTISKAKGQPREPQVYTLPPSREEMTKNQVSLTCLVKGFYPSDIAVEWESNGQPENNYKTTPPVLDSDGSFFLYSKLTVDKSRWQQGNVFSCSVMHEALHNHYTQKSLSLSPGK

SEQ ID NO: 451 - DNA, 1104 bp, Artificial Sequence
  Description of Artificial Sequence: Synthetic polynucleotide
atggatgcaatgaagagagggctctgctgtgtgctgctgctgtgtggagcagtcttcgtttcgcccggcgcctctgggcgtggggaggctgagacacgggagtgcatctactacaacgccaactgggagctggagcgcaccaaccagagcggcctggagcgctgcctgggcgagcaggacaagcggctgcactgctacgcctcctggcgcaacagctctggcaccatcgagctcgtgaagaagggctgctggctagatgacgaccggtgctacgataggcaggagtgtgtggccactgaggagaacccccaggtgtacttctgctgctgtgaaggcaacttctgcaacgagcgcttcactcatttgccagaggctgggggcccggaagtcacgtacgagccacccccgacagcccccaccggtggtggaactcacacatgcccaccgtgcccagcacctgaactcctggggggaccgtcagtcttcctcttccccccaaaacccaaggacaccctcatgatctcccggacccctgaggtcacatgcgtggtggtggacgtgagccacgaagaccctgaggtcaagttcaactggtacgtggacggcgtggaggtgcataatgccaagacaaagccgcgggaggagcagtacaacagcacgtaccgtgtggtcagcgtcctcaccgtcctgcaccaggactggctgaatggcaaggagtacaagtgcaaggtctccaacaaagccctcccagcccccatcgagaaaaccatctccaaagccaaagggcagccccgagaaccacaggtgtacaccctgcccccatcccgggaggagatgaccaagaaccaggtcagcctgacctgcctggtcaaaggcttctatcccagcgacatcgccgtggagtgggagagcaatgggcagccggagaacaactacaagaccacgcctcccgtgctggactccgacggctccttcttcctctatagcaagctcaccgtggacaagagcaggtggcagcaggggaacgtcttctcatgctccgtgatgcatgaggctctgcacaaccactacacgcagaagagcctctccctgtctccgggtaaa

SEQ ID NO: 452 - protein, 343 aa, Artificial Sequence
  Description of Artificial Sequence: Synthetic polypeptide
GRGEAETRECIYYNANWELERTNQSGLERCLGEQDKRLHCYASWRNSSGTIELVKKGCWLDDDRCYDRQECVATEENPQVYFCCCEGNFCNERFTHLPEAGGPEVTYEPPPTAPTGGGTHTCPPCPAPELLGGPSVFLFPPKPKDTLMISRTPEVTCVVVDVSHEDPEVKFNWYVDGVEVHNAKTKPREEQYNSTYRVVSVLTVLHQDWLNGKEYKCKVSNKALPAPIEKTISKAKGQPREPQVYTLPPSREEMTKNQVSLTCLVKGFYPSDIAVEWESNGQPENNYKTTPPVLDSDGSFFLYSKLTVDKSRWQQGNVFSCSVMHEALHNHYTQKSLSLSPGK

SEQ ID NO: 453 - protein, 368 aa, Artificial Sequence
  Description of Artificial Sequence: Synthetic polypeptide
MDAMKRGLCCVLLLCGAVFVSPGASGRGEAETRECIYYNANWELERTNQSGLERCEGDQDKRLHCYASWRNSSGTIELVKKGCWLDDDRCYDRQECVATEENPQVYFCCCEGNFCNERFTHLPEAGGPEVTYEPPPTAPTGGGTHTCPPCPAPELLGGPSVFLFPPKPKDTLMISRTPEVTCVVVDVSHEDPEVKFNWYVDGVEVHNAKTKPREEQYNSTYRVVSVLTVLHQDWLNGKEYKCKVSNKALPAPIEKTISKAKGQPREPQVYTLPPSREEMTKNQVSLTCLVKGFYPSDIAVEWESNGQPENNYKTTPPVLDSDGSFFLYSKLTVDKSRWQQGNVFSCSVMHEALHNHYTQKSLSLSPGK

SEQ ID NO: 454 - DNA, 1104 bp, Artificial Sequence
  Description of Artificial Sequence: Synthetic polynucleotide
atggatgcaatgaagagagggctctgctgtgtgctgctgctgtgtggagcagtcttcgtttcgcccggcgcctctgggcgtggggaggctgagacacgggagtgcatctactacaacgccaactgggagctggagcgcaccaaccagagcggcctggagcgctgcgaaggcgaccaggacaagcggctgcactgctacgcctcctggcgcaacagctctggcaccatcgagctcgtgaagaagggctgctggctagatgacgaccgttgctacgataggcaggagtgtgtggccactgaggagaacccccaggtgtacttctgctgctgtgaaggcaacttctgcaacgagcgcttcactcatttgccagaggctgggggcccggaagtcacgtacgagccacccccgacagcccccaccggtggtggaactcacacatgcccaccgtgcccagcacctgaactcctggggggaccgtcagtcttcctcttccccccaaaacccaaggacaccctcatgatctcccggacccctgaggtcacatgcgtggtggtggacgtgagccacgaagaccctgaggtcaagttcaactggtacgtggacggcgtggaggtgcataatgccaagacaaagccgcgggaggagcagtacaacagcacgtaccgtgtggtcagcgtcctcaccgtcctgcaccaggactggctgaatggcaaggagtacaagtgcaaggtctccaacaaagccctcccagcccccatcgagaaaaccatctccaaagccaaagggcagccccgagaaccacaggtgtacaccctgcccccatcccgggaggagatgaccaagaaccaggtcagcctgacctgcctggtcaaaggcttctatcccagcgacatcgccgtggagtgggagagcaatgggcagccggagaacaactacaagaccacgcctcccgtgctggactccgacggctccttcttcctctatagcaagctcaccgtggacaagagcaggtggcagcaggggaacgtcttctcatgctccgtgatgcatgaggctctgcacaaccactacacgcagaagagcctctccctgtctccgggtaaa

SEQ ID NO: 455 - protein, 343 aa, Artificial Sequence
  Description of Artificial Sequence: Synthetic polypeptide
GRGEAETRECIYYNANWELERTNQSGLERCEGDQDKRLHCYASWRNSSGTIELVKKGCWLDDDRCYDRQECVATEENPQVYFCCCEGNFCNERFTHLPEAGGPEVTYEPPPTAPTGGGTHTCPPCPAPELLGGPSVFLFPPKPKDTLMISRTPEVTCVVVDVSHEDPEVKFNWYVDGVEVHNAKTKPREEQYNSTYRVVSVLTVLHQDWLNGKEYKCKVSNKALPAPIEKTISKAKGQPREPQVYTLPPSREEMTKNQVSLTCLVKGFYPSDIAVEWESNGQPENNYKTTPPVLDSDGSFFLYSKLTVDKSRWQQGNVFSCSVMHEALHNHYTQKSLSLSPGK

SEQ ID NO: 456 - protein, 368 aa, Artificial Sequence
  Description of Artificial Sequence: Synthetic polypeptide
MDAMKRGLCCVLLLCGAVFVSPGASGRGEAETRECIYYNANWELERTNQSGLERCEGDQDKRLHCYASWRNSSGTIELVKKGCWLDDERCYDRQECVATEENPQVYFCCCEGNFCNERFTHLPEAGGPEVTYEPPPTAPTGGGTHTCPPCPAPELLGGPSVFLFPPKPKDTLMISRTPEVTCVVVDVSHEDPEVKFNWYVDGVEVHNAKTKPREEQYNSTYRVVSVLTVLHQDWLNGKEYKCKVSNKALPAPIEKTISKAKGQPREPQVYTLPPSREEMTKNQVSLTCLVKGFYPSDIAVEWESNGQPENNYKTTPPVLDSDGSFFLYSKLTVDKSRWQQGNVFSCSVMHEALHNHYTQKSLSLSPGK

SEQ ID NO: 457 - DNA, 1104 bp, Artificial Sequence
  Description of Artificial Sequence: Synthetic polynucleotide
atggatgcaatgaagagagggctctgctgtgtgctgctgctgtgtggagcagtcttcgtttcgcccggcgcctctgggcgtggggaggctgagacacgggagtgcatctactacaacgccaactgggagctggagcgcaccaaccagagcggcctggagcgctgcgaaggcgaccaggacaagcggctgcactgctacgcctcctggcgcaacagctctggcaccatcgagctcgtgaagaagggctgctggctagatgacgagcggtgctacgataggcaggagtgtgtggccactgaggagaacccccaggtgtacttctgctgctgtgaaggcaacttctgcaacgagcgcttcactcatttgccagaggctgggggcccggaagtcacgtacgagccacccccgacagcccccaccggtggtggaactcacacatgcccaccgtgcccagcacctgaactcctggggggaccgtcagtcttcctcttccccccaaaacccaaggacaccctcatgatctcccggacccctgaggtcacatgcgtggtggtggacgtgagccacgaagaccctgaggtcaagttcaactggtacgtggacggcgtggaggtgcataatgccaagacaaagccgcgggaggagcagtacaacagcacgtaccgtgtggtcagcgtcctcaccgtcctgcaccaggactggctgaatggcaaggagtacaagtgcaaggtctccaacaaagccctcccagcccccatcgagaaaaccatctccaaagccaaagggcagccccgagaaccacaggtgtacaccctgcccccatcccgggaggagatgaccaagaaccaggtcagcctgacctgcctggtcaaaggcttctatcccagcgacatcgccgtggagtgggagagcaatgggcagccggagaacaactacaagaccacgcctcccgtgctggactccgacggctccttcttcctctatagcaagctcaccgtggacaagagcaggtggcagcaggggaacgtcttctcatgctccgtgatgcatgaggctctgcacaaccactacacgcagaagagcctctccctgtctccgggtaaa

SEQ ID NO: 458 - protein, 343 aa, Artificial Sequence
  Description of Artificial Sequence: Synthetic polypeptide
GRGEAETRECIYYNANWELERTNQSGLERCEGDQDKRLHCYASWRNSSGTIELVKKGCWLDDERCYDRQECVATEENPQVYFCCCEGNFCNERFTHLPEAGGPEVTYEPPPTAPTGGGTHTCPPCPAPELLGGPSVFLFPPKPKDTLMISRTPEVTCVVVDVSHEDPEVKFNWYVDGVEVHNAKTKPREEQYNSTYRVVSVLTVLHQDWLNGKEYKCKVSNKALPAPIEKTISKAKGQPREPQVYTLPPSREEMTKNQVSLTCLVKGFYPSDIAVEWESNGQPENNYKTTPPVLDSDGSFFLYSKLTVDKSRWQQGNVFSCSVMHEALHNHYTQKSLSLSPGK

SEQ ID NO: 459 - protein, 368 aa, Artificial Sequence
  Description of Artificial Sequence: Synthetic polypeptide
MDAMKRGLCCVLLLCGAVFVSPGASGRGEAETRECIYYNANWELERTNQSGLERCEGDQDKRLHCYASWRNSSGTIELVKKGCWLDDTRCYDRQECVATEENPQVYFCCCEGNFCNERFTHLPEAGGPEVTYEPPPTAPTGGGTHTCPPCPAPELLGGPSVFLFPPKPKDTLMISRTPEVTCVVVDVSHEDPEVKFNWYVDGVEVHNAKTKPREEQYNSTYRVVSVLTVLHQDWLNGKEYKCKVSNKALPAPIEKTISKAKGQPREPQVYTLPPSREEMTKNQVSLTCLVKGFYPSDIAVEWESNGQPENNYKTTPPVLDSDGSFFLYSKLTVDKSRWQQGNVFSCSVMHEALHNHYTQKSLSLSPGK

SEQ ID NO: 460 - DNA, 1104 bp, Artificial Sequence
  Description of Artificial Sequence: Synthetic polynucleotide
atggatgcaatgaagagagggctctgctgtgtgctgctgctgtgtggagcagtcttcgtttcgcccggcgcctctgggcgtggggaggctgagacacgggagtgcatctactacaacgccaactgggagctggagcgcaccaaccagagcggcctggagcgctgcgaaggcgaccaggacaagcggctgcactgctacgcctcctggcgcaacagctctggcaccatcgagctcgtgaagaagggctgctggctagatgacacccgttgctacgataggcaggagtgtgtggccactgaggagaacccccaggtgtacttctgctgctgtgaaggcaacttctgcaacgagcgcttcactcatttgccagaggctgggggcccggaagtcacgtacgagccacccccgacagcccccaccggtggtggaactcacacatgcccaccgtgcccagcacctgaactcctggggggaccgtcagtcttcctcttccccccaaaacccaaggacaccctcatgatctcccggacccctgaggtcacatgcgtggtggtggacgtgagccacgaagaccctgaggtcaagttcaactggtacgtggacggcgtggaggtgcataatgccaagacaaagccgcgggaggagcagtacaacagcacgtaccgtgtggtcagcgtcctcaccgtcctgcaccaggactggctgaatggcaaggagtacaagtgcaaggtctccaacaaagccctcccagcccccatcgagaaaaccatctccaaagccaaagggcagccccgagaaccacaggtgtacaccctgcccccatcccgggaggagatgaccaagaaccaggtcagcctgacctgcctggtcaaaggcttctatcccagcgacatcgccgtggagtgggagagcaatgggcagccggagaacaactacaagaccacgcctcccgtgctggactccgacggctccttcttcctctatagcaagctcaccgtggacaagagcaggtggcagcaggggaacgtcttctcatgctccgtgatgcatgaggctctgcacaaccactacacgcagaagagcctctccctgtctccgggtaaa

SEQ ID NO: 461 - protein, 343 aa, Artificial Sequence
  Description of Artificial Sequence: Synthetic polypeptide
GRGEAETRECIYYNANWELERTNQSGLERCEGDQDKRLHCYASWRNSSGTIELVKKGCWLDDTRCYDRQECVATEENPQVYFCCCEGNFCNERFTHLPEAGGPEVTYEPPPTAPTGGGTHTCPPCPAPELLGGPSVFLFPPKPKDTLMISRTPEVTCVVVDVSHEDPEVKFNWYVDGVEVHNAKTKPREEQYNSTYRVVSVLTVLHQDWLNGKEYKCKVSNKALPAPIEKTISKAKGQPREPQVYTLPPSREEMTKNQVSLTCLVKGFYPSDIAVEWESNGQPENNYKTTPPVLDSDGSFFLYSKLTVDKSRWQQGNVFSCSVMHEALHNHYTQKSLSLSPGK

SEQ ID NO: 462 - protein, 368 aa, Artificial Sequence
  Description of Artificial Sequence: Synthetic polypeptide
MDAMKRGLCCVLLLCGAVFVSPGASGRGEAETRECIYYNANWELERTNQSGLERCEGNQDKRLHCYASWRNSSGTIELVKKGCWLDDIRCYDRQECVATEENPQVYFCCCEGNFCNERFTHLPEAGGPEVTYEPPPTAPTGGGTHTCPPCPAPELLGGPSVFLFPPKPKDTLMISRTPEVTCVVVDVSHEDPEVKFNWYVDGVEVHNAKTKPREEQYNSTYRVVSVLTVLHQDWLNGKEYKCKVSNKALPAPIEKTISKAKGQPREPQVYTLPPSREEMTKNQVSLTCLVKGFYPSDIAVEWESNGQPENNYKTTPPVLDSDGSFFLYSKLTVDKSRWQQGNVFSCSVMHEALHNHYTQKSLSLSPGK

SEQ ID NO: 463 - DNA, 1104 bp, Artificial Sequence
  Description of Artificial Sequence: Synthetic polynucleotide
atggatgcaatgaagagagggctctgctgtgtgctgctgctgtgtggagcagtcttcgtttcgcccggcgcctctgggcgtggggaggctgagacacgggagtgcatctactacaacgccaactgggagctggagcgcaccaaccagagcggcctggagcgctgcgaaggcaaccaggacaagcggctgcactgctacgcctcctggcgcaacagctctggcaccatcgagctcgtgaagaagggctgctggctagatgacatccgttgctacgataggcaggagtgtgtggccactgaggagaacccccaggtgtacttctgctgctgtgaaggcaacttctgcaacgagcgcttcactcatttgccagaggctgggggcccggaagtcacgtacgagccacccccgacagcccccaccggtggtggaactcacacatgcccaccgtgcccagcacctgaactcctggggggaccgtcagtcttcctcttccccccaaaacccaaggacaccctcatgatctcccggacccctgaggtcacatgcgtggtggtggacgtgagccacgaagaccctgaggtcaagttcaactggtacgtggacggcgtggaggtgcataatgccaagacaaagccgcgggaggagcagtacaacagcacgtaccgtgtggtcagcgtcctcaccgtcctgcaccaggactggctgaatggcaaggagtacaagtgcaaggtctccaacaaagccctcccagcccccatcgagaaaaccatctccaaagccaaagggcagccccgagaaccacaggtgtacaccctgcccccatcccgggaggagatgaccaagaaccaggtcagcctgacctgcctggtcaaaggcttctatcccagcgacatcgccgtggagtgggagagcaatgggcagccggagaacaactacaagaccacgcctcccgtgctggactccgacggctccttcttcctctatagcaagctcaccgtggacaagagcaggtggcagcaggggaacgtcttctcatgctccgtgatgcatgaggctctgcacaaccactacacgcagaagagcctctccctgtctccgggtaaa

SEQ ID NO: 464 - protein, 343 aa, Artificial Sequence
  Description of Artificial Sequence: Synthetic polypeptide
GRGEAETRECIYYNANWELERTNQSGLERCEGNQDKRLHCYASWRNSSGTIELVKKGCWLDDIRCYDRQECVATEENPQVYFCCCEGNFCNERFTHLPEAGGPEVTYEPPPTAPTGGGTHTCPPCPAPELLGGPSVFLFPPKPKDTLMISRTPEVTCVVVDVSHEDPEVKFNWYVDGVEVHNAKTKPREEQYNSTYRVVSVLTVLHQDWLNGKEYKCKVSNKALPAPIEKTISKAKGQPREPQVYTLPPSREEMTKNQVSLTCLVKGFYPSDIAVEWESNGQPENNYKTTPPVLDSDGSFFLYSKLTVDKSRWQQGNVFSCSVMHEALHNHYTQKSLSLSPGK

SEQ ID NO: 465 - protein, 368 aa, Artificial Sequence
  Description of Artificial Sequence: Synthetic polypeptide
MDAMKRGLCCVLLLCGAVFVSPGASGRGEAETRECIYYNANWELERTNQSGLERCEGNQDKRLHCYASWRNSSGTIELVKKGCWLDDYRCYDRQECVATEENPQVYFCCCEGNFCNERFTHLPEAGGPEVTYEPPPTAPTGGGTHTCPPCPAPELLGGPSVFLFPPKPKDTLMISRTPEVTCVVVDVSHEDPEVKFNWYVDGVEVHNAKTKPREEQYNSTYRVVSVLTVLHQDWLNGKEYKCKVSNKALPAPIEKTISKAKGQPREPQVYTLPPSREEMTKNQVSLTCLVKGFYPSDIAVEWESNGQPENNYKTTPPVLDSDGSFFLYSKLTVDKSRWQQGNVFSCSVMHEALHNHYTQKSLSLSPGK

SEQ ID NO: 466 - DNA, 1104 bp, Artificial Sequence
  Description of Artificial Sequence: Synthetic polynucleotide
atggatgcaatgaagagagggctctgctgtgtgctgctgctgtgtggagcagtcttcgtttcgcccggcgcctctgggcgtggggaggctgagacacgggagtgcatctactacaacgccaactgggagctggagcgcaccaaccagagcggcctggagcgctgcgaaggcaaccaggacaagcggctgcactgctacgcctcctggcgcaacagctctggcaccatcgagctcgtgaagaagggctgctggctagatgactaccggtgctacgataggcaggagtgtgtggccactgaggagaacccccaggtgtacttctgctgctgtgaaggcaacttctgcaacgagcgcttcactcatttgccagaggctgggggcccggaagtcacgtacgagccacccccgacagcccccaccggtggtggaactcacacatgcccaccgtgcccagcacctgaactcctggggggaccgtcagtcttcctcttccccccaaaacccaaggacaccctcatgatctcccggacccctgaggtcacatgcgtggtggtggacgtgagccacgaagaccctgaggtcaagttcaactggtacgtggacggcgtggaggtgcataatgccaagacaaagccgcgggaggagcagtacaacagcacgtaccgtgtggtcagcgtcctcaccgtcctgcaccaggactggctgaatggcaaggagtacaagtgcaaggtctccaacaaagccctcccagcccccatcgagaaaaccatctccaaagccaaagggcagccccgagaaccacaggtgtacaccctgcccccatcccgggaggagatgaccaagaaccaggtcagcctgacctgcctggtcaaaggcttctatcccagcgacatcgccgtggagtgggagagcaatgggcagccggagaacaactacaagaccacgcctcccgtgctggactccgacggctccttcttcctctatagcaagctcaccgtggacaagagcaggtggcagcaggggaacgtcttctcatgctccgtgatgcatgaggctctgcacaaccactacacgcagaagagcctctccctgtctccgggtaaa

SEQ ID NO: 467 - protein, 343 aa, Artificial Sequence
  Description of Artificial Sequence: Synthetic polypeptide
GRGEAETRECIYYNANWELERTNQSGLERCEGNQDKRLHCYASWRNSSGTIELVKKGCWLDDYRCYDRQECVATEENPQVYFCCCEGNFCNERFTHLPEAGGPEVTYEPPPTAPTGGGTHTCPPCPAPELLGGPSVFLFPPKPKDTLMISRTPEVTCVVVDVSHEDPEVKFNWYVDGVEVHNAKTKPREEQYNSTYRVVSVLTVLHQDWLNGKEYKCKVSNKALPAPIEKTISKAKGQPREPQVYTLPPSREEMTKNQVSLTCLVKGFYPSDIAVEWESNGQPENNYKTTPPVLDSDGSFFLYSKLTVDKSRWQQGNVFSCSVMHEALHNHYTQKSLSLSPGK

SEQ ID NO: 468 - protein, 368 aa, Artificial Sequence
  Description of Artificial Sequence: Synthetic polypeptide
MDAMKRGLCCVLLLCGAVFVSPGASGRGEAETRECIYYNANWELERTNQSGLERCEGYQDKRLHCYASWRNSSGTIELVKKGCWLDDDRCYDRQECVATEENPQVYFCCCEGNFCNERFTHLPEAGGPEVTYEPPPTAPTGGGTHTCPPCPAPELLGGPSVFLFPPKPKDTLMISRTPEVTCVVVDVSHEDPEVKFNWYVDGVEVHNAKTKPREEQYNSTYRVVSVLTVLHQDWLNGKEYKCKVSNKALPAPIEKTISKAKGQPREPQVYTLPPSREEMTKNQVSLTCLVKGFYPSDIAVEWESNGQPENNYKTTPPVLDSDGSFFLYSKLTVDKSRWQQGNVFSCSVMHEALHNHYTQKSLSLSPGK

SEQ ID NO: 469 - DNA, 1104 bp, Artificial Sequence
  Description of Artificial Sequence: Synthetic polynucleotide
atggatgcaatgaagagagggctctgctgtgtgctgctgctgtgtggagcagtcttcgtttcgcccggcgcctctgggcgtggggaggctgagacacgggagtgcatctactacaacgccaactgggagctggagcgcaccaaccagagcggcctggagcgctgcgaaggctaccaggacaagcggctgcactgctacgcctcctggcgcaacagctctggcaccatcgagctcgtgaagaagggctgctggctagatgacgaccgttgctacgataggcaggagtgtgtggccactgaggagaacccccaggtgtacttctgctgctgtgaaggcaacttctgcaacgagcgcttcactcatttgccagaggctgggggcccggaagtcacgtacgagccacccccgacagcccccaccggtggtggaactcacacatgcccaccgtgcccagcacctgaactcctggggggaccgtcagtcttcctcttccccccaaaacccaaggacaccctcatgatctcccggacccctgaggtcacatgcgtggtggtggacgtgagccacgaagaccctgaggtcaagttcaactggtacgtggacggcgtggaggtgcataatgccaagacaaagccgcgggaggagcagtacaacagcacgtaccgtgtggtcagcgtcctcaccgtcctgcaccaggactggctgaatggcaaggagtacaagtgcaaggtctccaacaaagccctcccagcccccatcgagaaaaccatctccaaagccaaagggcagccccgagaaccacaggtgtacaccctgcccccatcccgggaggagatgaccaagaaccaggtcagcctgacctgcctggtcaaaggcttctatcccagcgacatcgccgtggagtgggagagcaatgggcagccggagaacaactacaagaccacgcctcccgtgctggactccgacggctccttcttcctctatagcaagctcaccgtggacaagagcaggtggcagcaggggaacgtcttctcatgctccgtgatgcatgaggctctgcacaaccactacacgcagaagagcctctccctgtctccgggtaaa

SEQ ID NO: 470 - protein, 343 aa, Artificial Sequence
  Description of Artificial Sequence: Synthetic polypeptide
GRGEAETRECIYYNANWELERTNQSGLERCEGYQDKRLHCYASWRNSSGTIELVKKGCWLDDDRCYDRQECVATEENPQVYFCCCEGNFCNERFTHLPEAGGPEVTYEPPPTAPTGGGTHTCPPCPAPELLGGPSVFLFPPKPKDTLMISRTPEVTCVVVDVSHEDPEVKFNWYVDGVEVHNAKTKPREEQYNSTYRVVSVLTVLHQDWLNGKEYKCKVSNKALPAPIEKTISKAKGQPREPQVYTLPPSREEMTKNQVSLTCLVKGFYPSDIAVEWESNGQPENNYKTTPPVLDSDGSFFLYSKLTVDKSRWQQGNVFSCSVMHEALHNHYTQKSLSLSPGK

SEQ ID NO: 471 - protein, 368 aa, Artificial Sequence
  Description of Artificial Sequence: Synthetic polypeptide
MDAMKRGLCCVLLLCGAVFVSPGASGRGEAETRECIYYNANWELERTNQSGLERCEGEQDKREHCYASWRNSSGTIELVKKGCWLDDERCYDRQECVATEENPQVYFCCCEGNFCNERFTHLPEAGGPEVTYEPPPTAPTGGGTHTCPPCPAPELLGGPSVFLFPPKPKDTLMISRTPEVTCVVVDVSHEDPEVKFNWYVDGVEVHNAKTKPREEQYNSTYRVVSVLTVLHQDWLNGKEYKCKVSNKALPAPIEKTISKAKGQPREPQVYTLPPSREEMTKNQVSLTCLVKGFYPSDIAVEWESNGQPENNYKTTPPVLDSDGSFFLYSKLTVDKSRWQQGNVFSCSVMHEALHNHYTQKSLSLSPGK

SEQ ID NO: 472 - DNA, 1104 bp, Artificial Sequence
  Description of Artificial Sequence: Synthetic polynucleotide
atggatgcaatgaagagagggctctgctgtgtgctgctgctgtgtggagcagtcttcgtttcgcccggcgcctctgggcgtggggaggctgagacacgggagtgcatctactacaacgccaactgggagctggagcgcaccaaccagagcggcctggagcgctgcgaaggcgagcaggacaagcgggagcactgctacgcctcctggcgcaacagctctggcaccatcgagctcgtgaagaagggctgctggctagatgacgagcggtgctacgataggcaggagtgtgtggccactgaggagaacccccaggtgtacttctgctgctgtgaaggcaacttctgcaacgagcgcttcactcatttgccagaggctgggggcccggaagtcacgtacgagccacccccgacagcccccaccggtggtggaactcacacatgcccaccgtgcccagcacctgaactcctggggggaccgtcagtcttcctcttccccccaaaacccaaggacaccctcatgatctcccggacccctgaggtcacatgcgtggtggtggacgtgagccacgaagaccctgaggtcaagttcaactggtacgtggacggcgtggaggtgcataatgccaagacaaagccgcgggaggagcagtacaacagcacgtaccgtgtggtcagcgtcctcaccgtcctgcaccaggactggctgaatggcaaggagtacaagtgcaaggtctccaacaaagccctcccagcccccatcgagaaaaccatctccaaagccaaagggcagccccgagaaccacaggtgtacaccctgcccccatcccgggaggagatgaccaagaaccaggtcagcctgacctgcctggtcaaaggcttctatcccagcgacatcgccgtggagtgggagagcaatgggcagccggagaacaactacaagaccacgcctcccgtgctggactccgacggctccttcttcctctatagcaagctcaccgtggacaagagcaggtggcagcaggggaacgtcttctcatgctccgtgatgcatgaggctctgcacaaccactacacgcagaagagcctctccctgtctccgggtaaa

SEQ ID NO: 473 - protein, 343 aa, Artificial Sequence
  Description of Artificial Sequence: Synthetic polypeptide
GRGEAETRECIYYNANWELERTNQSGLERCEGEQDKREHCYASWRNSSGTIELVKKGCWLDDERCYDRQECVATEENPQVYFCCCEGNFCNERFTHLPEAGGPEVTYEPPPTAPTGGGTHTCPPCPAPELLGGPSVFLFPPKPKDTLMISRTPEVTCVVVDVSHEDPEVKFNWYVDGVEVHNAKTKPREEQYNSTYRVVSVLTVLHQDWLNGKEYKCKVSNKALPAPIEKTISKAKGQPREPQVYTLPPSREEMTKNQVSLTCLVKGFYPSDIAVEWESNGQPENNYKTTPPVLDSDGSFFLYSKLTVDKSRWQQGNVFSCSVMHEALHNHYTQKSLSLSPGK

SEQ ID NO: 474 - protein, 368 aa, Artificial Sequence
  Description of Artificial Sequence: Synthetic polypeptide
MDAMKRGLCCVLLLCGAVFVSPGASGRGEAETRECIYYNANWELERTNQSGLERCEGEQDKRIHCYASWRNSSGTIELVKKGCWLDDDRCYDRQECVATEENPQVYFCCCEGNFCNERFTHLPEAGGPEVTYEPPPTAPTGGGTHTCPPCPAPELLGGPSVFLFPPKPKDTLMISRTPEVTCVVVDVSHEDPEVKFNWYVDGVEVHNAKTKPREEQYNSTYRVVSVLTVLHQDWLNGKEYKCKVSNKALPAPIEKTISKAKGQPREPQVYTLPPSREEMTKNQVSLTCLVKGFYPSDIAVEWESNGQPENNYKTTPPVLDSDGSFFLYSKLTVDKSRWQQGNVFSCSVMHEALHNHYTQKSLSLSPGK

SEQ ID NO: 475 - DNA, 1104 bp, Artificial Sequence
  Description of Artificial Sequence: Synthetic polynucleotide
atggatgcaatgaagagagggctctgctgtgtgctgctgctgtgtggagcagtcttcgtttcgcccggcgcctctgggcgtggggaggctgagacacgggagtgcatctactacaacgccaactgggagctggagcgcaccaaccagagcggcctggagcgctgcgaaggcgagcaggacaagcggatccactgctacgcctcctggcgcaacagctctggcaccatcgagctcgtgaagaagggctgctggctagatgacgaccgttgctacgataggcaggagtgtgtggccactgaggagaacccccaggtgtacttctgctgctgtgaaggcaacttctgcaacgagcgcttcactcatttgccagaggctgggggcccggaagtcacgtacgagccacccccgacagcccccaccggtggtggaactcacacatgcccaccgtgcccagcacctgaactcctggggggaccgtcagtcttcctcttccccccaaaacccaaggacaccctcatgatctcccggacccctgaggtcacatgcgtggtggtggacgtgagccacgaagaccctgaggtcaagttcaactggtacgtggacggcgtggaggtgcataatgccaagacaaagccgcgggaggagcagtacaacagcacgtaccgtgtggtcagcgtcctcaccgtcctgcaccaggactggctgaatggcaaggagtacaagtgcaaggtctccaacaaagccctcccagcccccatcgagaaaaccatctccaaagccaaagggcagccccgagaaccacaggtgtacaccctgcccccatcccgggaggagatgaccaagaaccaggtcagcctgacctgcctggtcaaaggcttctatcccagcgacatcgccgtggagtgggagagcaatgggcagccggagaacaactacaagaccacgcctcccgtgctggactccgacggctccttcttcctctatagcaagctcaccgtggacaagagcaggtggcagcaggggaacgtcttctcatgctccgtgatgcatgaggctctgcacaaccactacacgcagaagagcctctccctgtctccgggtaaa

SEQ ID NO: 476 - protein, 343 aa, Artificial Sequence
  Description of Artificial Sequence: Synthetic polypeptide
GRGEAETRECIYYNANWELERTNQSGLERCEGEQDKRIHCYASWRNSSGTIELVKKGCWLDDDRCYDRQECVATEENPQVYFCCCEGNFCNERFTHLPEAGGPEVTYEPPPTAPTGGGTHTCPPCPAPELLGGPSVFLFPPKPKDTLMISRTPEVTCVVVDVSHEDPEVKFNWYVDGVEVHNAKTKPREEQYNSTYRVVSVLTVLHQDWLNGKEYKCKVSNKALPAPIEKTISKAKGQPREPQVYTLPPSREEMTKNQVSLTCLVKGFYPSDIAVEWESNGQPENNYKTTPPVLDSDGSFFLYSKLTVDKSRWQQGNVFSCSVMHEALHNHYTQKSLSLSPGK

SEQ ID NO: 477 - protein, 368 aa, Artificial Sequence
  Description of Artificial Sequence: Synthetic polypeptide
MDAMKRGLCCVLLLCGAVFVSPGASGRGEAETRECIYYNANWELERTNQSGLERCEGEQDKRIHCYASWRNSSGTIELVKKGCWLDDERCYDRQECVATEENPQVYFCCCEGNFCNERFTHLPEAGGPEVTYEPPPTAPTGGGTHTCPPCPAPELLGGPSVFLFPPKPKDTLMISRTPEVTCVVVDVSHEDPEVKFNWYVDGVEVHNAKTKPREEQYNSTYRVVSVLTVLHQDWLNGKEYKCKVSNKALPAPIEKTISKAKGQPREPQVYTLPPSREEMTKNQVSLTCLVKGFYPSDIAVEWESNGQPENNYKTTPPVLDSDGSFFLYSKLTVDKSRWQQGNVFSCSVMHEALHNHYTQKSLSLSPGK

SEQ ID NO: 478 - DNA, 1104 bp, Artificial Sequence
  Description of Artificial Sequence: Synthetic polynucleotide
atggatgcaatgaagagagggctctgctgtgtgctgctgctgtgtggagcagtcttcgtttcgcccggcgcctctgggcgtggggaggctgagacacgggagtgcatctactacaacgccaactgggagctggagcgcaccaaccagagcggcctggagcgctgcgaaggcgagcaggacaagcggatccactgctacgcctcctggcgcaacagctctggcaccatcgagctcgtgaagaagggctgctggctagatgacgagcgttgctacgataggcaggagtgtgtggccactgaggagaacccccaggtgtacttctgctgctgtgaaggcaacttctgcaacgagcgcttcactcatttgccagaggctgggggcccggaagtcacgtacgagccacccccgacagcccccaccggtggtggaactcacacatgcccaccgtgcccagcacctgaactcctggggggaccgtcagtcttcctcttccccccaaaacccaaggacaccctcatgatctcccggacccctgaggtcacatgcgtggtggtggacgtgagccacgaagaccctgaggtcaagttcaactggtacgtggacggcgtggaggtgcataatgccaagacaaagccgcgggaggagcagtacaacagcacgtaccgtgtggtcagcgtcctcaccgtcctgcaccaggactggctgaatggcaaggagtacaagtgcaaggtctccaacaaagccctcccagcccccatcgagaaaaccatctccaaagccaaagggcagccccgagaaccacaggtgtacaccctgcccccatcccgggaggagatgaccaagaaccaggtcagcctgacctgcctggtcaaaggcttctatcccagcgacatcgccgtggagtgggagagcaatgggcagccggagaacaactacaagaccacgcctcccgtgctggactccgacggctccttcttcctctatagcaagctcaccgtggacaagagcaggtggcagcaggggaacgtcttctcatgctccgtgatgcatgaggctctgcacaaccactacacgcagaagagcctctccctgtctccgggtaaa

SEQ ID NO: 479 - protein, 343 aa, Artificial Sequence
  Description of Artificial Sequence: Synthetic polypeptide
GRGEAETRECIYYNANWELERTNQSGLERCEGEQDKRIHCYASWRNSSGTIELVKKGCWLDDERCYDRQECVATEENPQVYFCCCEGNFCNERFTHLPEAGGPEVTYEPPPTAPTGGGTHTCPPCPAPELLGGPSVFLFPPKPKDTLMISRTPEVTCVVVDVSHEDPEVKFNWYVDGVEVHNAKTKPREEQYNSTYRVVSVLTVLHQDWLNGKEYKCKVSNKALPAPIEKTISKAKGQPREPQVYTLPPSREEMTKNQVSLTCLVKGFYPSDIAVEWESNGQPENNYKTTPPVLDSDGSFFLYSKLTVDKSRWQQGNVFSCSVMHEALHNHYTQKSLSLSPGK

SEQ ID NO: 480 - protein, 368 aa, Artificial Sequence
  Description of Artificial Sequence: Synthetic polypeptide
MDAMKRGLCCVLLLCGAVFVSPGASGRGEAETRECIYYNANWELERTNQSGLERCEGEQDKRRHCYASWRNSSGTIELVKKGCWLDDDRCYDRQECVATEENPQVYFCCCEGNFCNERFTHLPEAGGPEVTYEPPPTAPTGGGTHTCPPCPAPELLGGPSVFLFPPKPKDTLMISRTPEVTCVVVDVSHEDPEVKFNWYVDGVEVHNAKTKPREEQYNSTYRVVSVLTVLHQDWLNGKEYKCKVSNKALPAPIEKTISKAKGQPREPQVYTLPPSREEMTKNQVSLTCLVKGFYPSDIAVEWESNGQPENNYKTTPPVLDSDGSFFLYSKLTVDKSRWQQGNVFSCSVMHEALHNHYTQKSLSLSPGK

SEQ ID NO: 481 - DNA, 1104 bp, Artificial Sequence
  Description of Artificial Sequence: Synthetic polynucleotide
atggatgcaatgaagagagggctctgctgtgtgctgctgctgtgtggagcagtcttcgtttcgcccggcgcctctgggcgtggggaggctgagacacgggagtgcatctactacaacgccaactgggagctggagcgcaccaaccagagcggcctggagcgctgcgaaggcgagcaggacaagcggaggcactgctacgcctcctggcgcaacagctctggcaccatcgagctcgtgaagaagggctgctggctagatgacgaccgttgctacgataggcaggagtgtgtggccactgaggagaacccccaggtgtacttctgctgctgtgaaggcaacttctgcaacgagcgcttcactcatttgccagaggctgggggcccggaagtcacgtacgagccacccccgacagcccccaccggtggtggaactcacacatgcccaccgtgcccagcacctgaactcctggggggaccgtcagtcttcctcttccccccaaaacccaaggacaccctcatgatctcccggacccctgaggtcacatgcgtggtggtggacgtgagccacgaagaccctgaggtcaagttcaactggtacgtggacggcgtggaggtgcataatgccaagacaaagccgcgggaggagcagtacaacagcacgtaccgtgtggtcagcgtcctcaccgtcctgcaccaggactggctgaatggcaaggagtacaagtgcaaggtctccaacaaagccctcccagcccccatcgagaaaaccatctccaaagccaaagggcagccccgagaaccacaggtgtacaccctgcccccatcccgggaggagatgaccaagaaccaggtcagcctgacctgcctggtcaaaggcttctatcccagcgacatcgccgtggagtgggagagcaatgggcagccggagaacaactacaagaccacgcctcccgtgctggactccgacggctccttcttcctctatagcaagctcaccgtggacaagagcaggtggcagcaggggaacgtcttctcatgctccgtgatgcatgaggctctgcacaaccactacacgcagaagagcctctccctgtctccgggtaaa

SEQ ID NO: 482 - protein, 343 aa, Artificial Sequence
  Description of Artificial Sequence: Synthetic polypeptide
GRGEAETRECIYYNANWELERTNQSGLERCEGEQDKRRHCYASWRNSSGTIELVKKGCWLDDDRCYDRQECVATEENPQVYFCCCEGNFCNERFTHLPEAGGPEVTYEPPPTAPTGGGTHTCPPCPAPELLGGPSVFLFPPKPKDTLMISRTPEVTCVVVDVSHEDPEVKFNWYVDGVEVHNAKTKPREEQYNSTYRVVSVLTVLHQDWLNGKEYKCKVSNKALPAPIEKTISKAKGQPREPQVYTLPPSREEMTKNQVSLTCLVKGFYPSDIAVEWESNGQPENNYKTTPPVLDSDGSFFLYSKLTVDKSRWQQGNVFSCSVMHEALHNHYTQKSLSLSPGK

SEQ ID NO: 483 - protein, 368 aa, Artificial Sequence
  Description of Artificial Sequence: Synthetic polypeptide
MDAMKRGLCCVLLLCGAVFVSPGASGRGEAETRECIYYNANWELERTNQSGLERCEGEQDKRRHCYASWRNSSGTIELVKKGCWLDDERCYDRQECVATEENPQVYFCCCEGNFCNERFTHLPEAGGPEVTYEPPPTAPTGGGTHTCPPCPAPELLGGPSVFLFPPKPKDTLMISRTPEVTCVVVDVSHEDPEVKFNWYVDGVEVHNAKTKPREEQYNSTYRVVSVLTVLHQDWLNGKEYKCKVSNKALPAPIEKTISKAKGQPREPQVYTLPPSREEMTKNQVSLTCLVKGFYPSDIAVEWESNGQPENNYKTTPPVLDSDGSFFLYSKLTVDKSRWQQGNVFSCSVMHEALHNHYTQKSLSLSPGK

SEQ ID NO: 484 - DNA, 1104 bp, Artificial Sequence
  Description of Artificial Sequence: Synthetic polynucleotide
atggatgcaatgaagagagggctctgctgtgtgctgctgctgtgtggagcagtcttcgtttcgcccggcgcctctgggcgtggggaggctgagacacgggagtgcatctactacaacgccaactgggagctggagcgcaccaaccagagcggcctggagcgctgcgaaggcgagcaggacaagcggaggcactgctacgcctcctggcgcaacagctctggcaccatcgagctcgtgaagaagggctgctggctagatgacgagcgttgctacgataggcaggagtgtgtggccactgaggagaacccccaggtgtacttctgctgctgtgaaggcaacttctgcaacgagcgcttcactcatttgccagaggctgggggcccggaagtcacgtacgagccacccccgacagcccccaccggtggtggaactcacacatgcccaccgtgcccagcacctgaactcctggggggaccgtcagtcttcctcttccccccaaaacccaaggacaccctcatgatctcccggacccctgaggtcacatgcgtggtggtggacgtgagccacgaagaccctgaggtcaagttcaactggtacgtggacggcgtggaggtgcataatgccaagacaaagccgcgggaggagcagtacaacagcacgtaccgtgtggtcagcgtcctcaccgtcctgcaccaggactggctgaatggcaaggagtacaagtgcaaggtctccaacaaagccctcccagcccccatcgagaaaaccatctccaaagccaaagggcagccccgagaaccacaggtgtacaccctgcccccatcccgggaggagatgaccaagaaccaggtcagcctgacctgcctggtcaaaggcttctatcccagcgacatcgccgtggagtgggagagcaatgggcagccggagaacaactacaagaccacgcctcccgtgctggactccgacggctccttcttcctctatagcaagctcaccgtggacaagagcaggtggcagcaggggaacgtcttctcatgctccgtgatgcatgaggctctgcacaaccactacacgcagaagagcctctccctgtctccgggtaaa

SEQ ID NO: 485 - protein, 343 aa, Artificial Sequence
  Description of Artificial Sequence: Synthetic polypeptide
GRGEAETRECIYYNANWELERTNQSGLERCEGEQDKRRHCYASWRNSSGTIELVKKGCWLDDERCYDRQECVATEENPQVYFCCCEGNFCNERFTHLPEAGGPEVTYEPPPTAPTGGGTHTCPPCPAPELLGGPSVFLFPPKPKDTLMISRTPEVTCVVVDVSHEDPEVKFNWYVDGVEVHNAKTKPREEQYNSTYRVVSVLTVLHQDWLNGKEYKCKVSNKALPAPIEKTISKAKGQPREPQVYTLPPSREEMTKNQVSLTCLVKGFYPSDIAVEWESNGQPENNYKTTPPVLDSDGSFFLYSKLTVDKSRWQQGNVFSCSVMHEALHNHYTQKSLSLSPGK

SEQ ID NO: 486 - protein, 368 aa, Artificial Sequence
  Description of Artificial Sequence: Synthetic polypeptide
MDAMKRGLCCVLLLCGAVFVSPGASGRGEAETRECIYYNANWELERTNQSGLERCEGEQDKRRHCYASWRNSSGTIELVKKGCWLDDLRCYDRQECVATEENPQVYFCCCEGNFCNERFTHLPEAGGPEVTYEPPPTAPTGGGTHTCPPCPAPELLGGPSVFLFPPKPKDTLMISRTPEVTCVVVDVSHEDPEVKFNWYVDGVEVHNAKTKPREEQYNSTYRVVSVLTVLHQDWLNGKEYKCKVSNKALPAPIEKTISKAKGQPREPQVYTLPPSREEMTKNQVSLTCLVKGFYPSDIAVEWESNGQPENNYKTTPPVLDSDGSFFLYSKLTVDKSRWQQGNVFSCSVMHEALHNHYTQKSLSLSPGK

SEQ ID NO: 487 - DNA, 1104 bp, Artificial Sequence
  Description of Artificial Sequence: Synthetic polynucleotide
atggatgcaatgaagagagggctctgctgtgtgctgctgctgtgtggagcagtcttcgtttcgcccggcgcctctgggcgtggggaggctgagacacgggagtgcatctactacaacgccaactgggagctggagcgcaccaaccagagcggcctggagcgctgcgaaggcgagcaggacaagcggcggcactgctacgcctcctggcgcaacagctctggcaccatcgagctcgtgaagaagggctgctggctagatgacctgcggtgctacgataggcaggagtgtgtggccactgaggagaacccccaggtgtacttctgctgctgtgaaggcaacttctgcaacgagcgcttcactcatttgccagaggctgggggcccggaagtcacgtacgagccacccccgacagcccccaccggtggtggaactcacacatgcccaccgtgcccagcacctgaactcctggggggaccgtcagtcttcctcttccccccaaaacccaaggacaccctcatgatctcccggacccctgaggtcacatgcgtggtggtggacgtgagccacgaagaccctgaggtcaagttcaactggtacgtggacggcgtggaggtgcataatgccaagacaaagccgcgggaggagcagtacaacagcacgtaccgtgtggtcagcgtcctcaccgtcctgcaccaggactggctgaatggcaaggagtacaagtgcaaggtctccaacaaagccctcccagcccccatcgagaaaaccatctccaaagccaaagggcagccccgagaaccacaggtgtacaccctgcccccatcccgggaggagatgaccaagaaccaggtcagcctgacctgcctggtcaaaggcttctatcccagcgacatcgccgtggagtgggagagcaatgggcagccggagaacaactacaagaccacgcctcccgtgctggactccgacggctccttcttcctctatagcaagctcaccgtggacaagagcaggtggcagcaggggaacgtcttctcatgctccgtgatgcatgaggctctgcacaaccactacacgcagaagagcctctccctgtctccgggtaaa

SEQ ID NO: 488 - protein, 343 aa, Artificial Sequence
  Description of Artificial Sequence: Synthetic polypeptide
GRGEAETRECIYYNANWELERTNQSGLERCEGEQDKRRHCYASWRNSSGTIELVKKGCWLDDLRCYDRQECVATEENPQVYFCCCEGNFCNERFTHLPEAGGPEVTYEPPPTAPTGGGTHTCPPCPAPELLGGPSVFLFPPKPKDTLMISRTPEVTCVVVDVSHEDPEVKFNWYVDGVEVHNAKTKPREEQYNSTYRVVSVLTVLHQDWLNGKEYKCKVSNKALPAPIEKTISKAKGQPREPQVYTLPPSREEMTKNQVSLTCLVKGFYPSDIAVEWESNGQPENNYKTTPPVLDSDGSFFLYSKLTVDKSRWQQGNVFSCSVMHEALHNHYTQKSLSLSPGK

SEQ ID NO: 489 - protein, 368 aa, Artificial Sequence
  Description of Artificial Sequence: Synthetic polypeptide
MDAMKRGLCCVLLLCGAVFVSPGASGRGEAETRECIYYNANWELERTNQSGLERCEGEQDKRTHCYASWRNSSGTIELVKKGCWLDDYRCYDRQECVATEENPQVYFCCCEGNFCNERFTHLPEAGGPEVTYEPPPTAPTGGGTHTCPPCPAPELLGGPSVFLFPPKPKDTLMISRTPEVTCVVVDVSHEDPEVKFNWYVDGVEVHNAKTKPREEQYNSTYRVVSVLTVLHQDWLNGKEYKCKVSNKALPAPIEKTISKAKGQPREPQVYTLPPSREEMTKNQVSLTCLVKGFYPSDIAVEWESNGQPENNYKTTPPVLDSDGSFFLYSKLTVDKSRWQQGNVFSCSVMHEALHNHYTQKSLSLSPGK

SEQ ID NO: 490 - DNA, 1104 bp, Artificial Sequence
  Description of Artificial Sequence: Synthetic polynucleotide
atggatgcaatgaagagagggctctgctgtgtgctgctgctgtgtggagcagtcttcgtttcgcccggcgcctctgggcgtggggaggctgagacacgggagtgcatctactacaacgccaactgggagctggagcgcaccaaccagagcggcctggagcgctgcgaaggcgagcaggacaagcggacccactgctacgcctcctggcgcaacagctctggcaccatcgagctcgtgaagaagggctgctggctagatgactaccggtgctacgataggcaggagtgtgtggccactgaggagaacccccaggtgtacttctgctgctgtgaaggcaacttctgcaacgagcgcttcactcatttgccagaggctgggggcccggaagtcacgtacgagccacccccgacagcccccaccggtggtggaactcacacatgcccaccgtgcccagcacctgaactcctggggggaccgtcagtcttcctcttccccccaaaacccaaggacaccctcatgatctcccggacccctgaggtcacatgcgtggtggtggacgtgagccacgaagaccctgaggtcaagttcaactggtacgtggacggcgtggaggtgcataatgccaagacaaagccgcgggaggagcagtacaacagcacgtaccgtgtggtcagcgtcctcaccgtcctgcaccaggactggctgaatggcaaggagtacaagtgcaaggtctccaacaaagccctcccagcccccatcgagaaaaccatctccaaagccaaagggcagccccgagaaccacaggtgtacaccctgcccccatcccgggaggagatgaccaagaaccaggtcagcctgacctgcctggtcaaaggcttctatcccagcgacatcgccgtggagtgggagagcaatgggcagccggagaacaactacaagaccacgcctcccgtgctggactccgacggctccttcttcctctatagcaagctcaccgtggacaagagcaggtggcagcaggggaacgtcttctcatgctccgtgatgcatgaggctctgcacaaccactacacgcagaagagcctctccctgtctccgggtaaa

SEQ ID NO: 491 - protein, 343 aa, Artificial Sequence
  Description of Artificial Sequence: Synthetic polypeptide
GRGEAETRECIYYNANWELERTNQSGLERCEGEQDKRTHCYASWRNSSGTIELVKKGCWLDDYRCYDRQECVATEENPQVYFCCCEGNFCNERFTHLPEAGGPEVTYEPPPTAPTGGGTHTCPPCPAPELLGGPSVFLFPPKPKDTLMISRTPEVTCVVVDVSHEDPEVKFNWYVDGVEVHNAKTKPREEQYNSTYRVVSVLTVLHQDWLNGKEYKCKVSNKALPAPIEKTISKAKGQPREPQVYTLPPSREEMTKNQVSLTCLVKGFYPSDIAVEWESNGQPENNYKTTPPVLDSDGSFFLYSKLTVDKSRWQQGNVFSCSVMHEALHNHYTQKSLSLSPGK

SEQ ID NO: 492 - protein, 368 aa, Artificial Sequence
  Description of Artificial Sequence: Synthetic polypeptide
MDAMKRGLCCVLLLCGAVFVSPGASGRGEAETRECIYYNANWELERTNQSGLERCEGEQDKRVHCYASWRNSSGTIELVKKGCWLDDDRCYDRQECVATEENPQVYFCCCEGNFCNERFTHLPEAGGPEVTYEPPPTAPTGGGTHTCPPCPAPELLGGPSVFLFPPKPKDTLMISRTPEVTCVVVDVSHEDPEVKFNWYVDGVEVHNAKTKPREEQYNSTYRVVSVLTVLHQDWLNGKEYKCKVSNKALPAPIEKTISKAKGQPREPQVYTLPPSREEMTKNQVSLTCLVKGFYPSDIAVEWESNGQPENNYKTTPPVLDSDGSFFLYSKLTVDKSRWQQGNVFSCSVMHEALHNHYTQKSLSLSPGK

SEQ ID NO: 493 - DNA, 1104 bp, Artificial Sequence
  Description of Artificial Sequence: Synthetic polynucleotide
atggatgcaatgaagagagggctctgctgtgtgctgctgctgtgtggagcagtcttcgtttcgcccggcgcctctgggcgtggggaggctgagacacgggagtgcatctactacaacgccaactgggagctggagcgcaccaaccagagcggcctggagcgctgcgaaggcgagcaggacaagcgggtgcactgctacgcctcctggcgcaacagctctggcaccatcgagctcgtgaagaagggctgctggctagatgacgaccgttgctacgataggcaggagtgtgtggccactgaggagaacccccaggtgtacttctgctgctgtgaaggcaacttctgcaacgagcgcttcactcatttgccagaggctgggggcccggaagtcacgtacgagccacccccgacagcccccaccggtggtggaactcacacatgcccaccgtgcccagcacctgaactcctggggggaccgtcagtcttcctcttccccccaaaacccaaggacaccctcatgatctcccggacccctgaggtcacatgcgtggtggtggacgtgagccacgaagaccctgaggtcaagttcaactggtacgtggacggcgtggaggtgcataatgccaagacaaagccgcgggaggagcagtacaacagcacgtaccgtgtggtcagcgtcctcaccgtcctgcaccaggactggctgaatggcaaggagtacaagtgcaaggtctccaacaaagccctcccagcccccatcgagaaaaccatctccaaagccaaagggcagccccgagaaccacaggtgtacaccctgcccccatcccgggaggagatgaccaagaaccaggtcagcctgacctgcctggtcaaaggcttctatcccagcgacatcgccgtggagtgggagagcaatgggcagccggagaacaactacaagaccacgcctcccgtgctggactccgacggctccttcttcctctatagcaagctcaccgtggacaagagcaggtggcagcaggggaacgtcttctcatgctccgtgatgcatgaggctctgcacaaccactacacgcagaagagcctctccctgtctccgggtaaa

SEQ ID NO: 494 - protein, 343 aa, Artificial Sequence
  Description of Artificial Sequence: Synthetic polypeptide
GRGEAETRECIYYNANWELERTNQSGLERCEGEQDKRVHCYASWRNSSGTIELVKKGCWLDDDRCYDRQECVATEENPQVYFCCCEGNFCNERFTHLPEAGGPEVTYEPPPTAPTGGGTHTCPPCPAPELLGGPSVFLFPPKPKDTLMISRTPEVTCVVVDVSHEDPEVKFNWYVDGVEVHNAKTKPREEQYNSTYRVVSVLTVLHQDWLNGKEYKCKVSNKALPAPIEKTISKAKGQPREPQVYTLPPSREEMTKNQVSLTCLVKGFYPSDIAVEWESNGQPENNYKTTPPVLDSDGSFFLYSKLTVDKSRWQQGNVFSCSVMHEALHNHYTQKSLSLSPGK

SEQ ID NO: 495 - protein, 368 aa, Artificial Sequence
  Description of Artificial Sequence: Synthetic polypeptide
MDAMKRGLCCVLLLCGAVFVSPGASGRGEAETRECIYYNANWELERTNQSGLERCEGEQDKRVHCYASWRNSSGTIELVKKGCWLDDYRCYDRQECVATEENPQVYFCCCEGNFCNERFTHLPEAGGPEVTYEPPPTAPTGGGTHTCPPCPAPELLGGPSVFLFPPKPKDTLMISRTPEVTCVVVDVSHEDPEVKFNWYVDGVEVHNAKTKPREEQYNSTYRVVSVLTVLHQDWLNGKEYKCKVSNKALPAPIEKTISKAKGQPREPQVYTLPPSREEMTKNQVSLTCLVKGFYPSDIAVEWESNGQPENNYKTTPPVLDSDGSFFLYSKLTVDKSRWQQGNVFSCSVMHEALHNHYTQKSLSLSPGK

SEQ ID NO: 496 - DNA, 1104 bp, Artificial Sequence
  Description of Artificial Sequence: Synthetic polynucleotide
atggatgcaatgaagagagggctctgctgtgtgctgctgctgtgtggagcagtcttcgtttcgcccggcgcctctgggcgtggggaggctgagacacgggagtgcatctactacaacgccaactgggagctggagcgcaccaaccagagcggcctggagcgctgcgaaggcgagcaggacaagcgggtgcactgctacgcctcctggcgcaacagctctggcaccatcgagctcgtgaagaagggctgctggctagatgactaccgttgctacgataggcaggagtgtgtggccactgaggagaacccccaggtgtacttctgctgctgtgaaggcaacttctgcaacgagcgcttcactcatttgccagaggctgggggcccggaagtcacgtacgagccacccccgacagcccccaccggtggtggaactcacacatgcccaccgtgcccagcacctgaactcctggggggaccgtcagtcttcctcttccccccaaaacccaaggacaccctcatgatctcccggacccctgaggtcacatgcgtggtggtggacgtgagccacgaagaccctgaggtcaagttcaactggtacgtggacggcgtggaggtgcataatgccaagacaaagccgcgggaggagcagtacaacagcacgtaccgtgtggtcagcgtcctcaccgtcctgcaccaggactggctgaatggcaaggagtacaagtgcaaggtctccaacaaagccctcccagcccccatcgagaaaaccatctccaaagccaaagggcagccccgagaaccacaggtgtacaccctgcccccatcccgggaggagatgaccaagaaccaggtcagcctgacctgcctggtcaaaggcttctatcccagcgacatcgccgtggagtgggagagcaatgggcagccggagaacaactacaagaccacgcctcccgtgctggactccgacggctccttcttcctctatagcaagctcaccgtggacaagagcaggtggcagcaggggaacgtcttctcatgctccgtgatgcatgaggctctgcacaaccactacacgcagaagagcctctccctgtctccgggtaaa

SEQ ID NO: 497 - protein, 343 aa, Artificial Sequence
  Description of Artificial Sequence: Synthetic polypeptide
GRGEAETRECIYYNANWELERTNQSGLERCEGEQDKRVHCYASWRNSSGTIELVKKGCWLDDYRCYDRQECVATEENPQVYFCCCEGNFCNERFTHLPEAGGPEVTYEPPPTAPTGGGTHTCPPCPAPELLGGPSVFLFPPKPKDTLMISRTPEVTCVVVDVSHEDPEVKFNWYVDGVEVHNAKTKPREEQYNSTYRVVSVLTVLHQDWLNGKEYKCKVSNKALPAPIEKTISKAKGQPREPQVYTLPPSREEMTKNQVSLTCLVKGFYPSDIAVEWESNGQPENNYKTTPPVLDSDGSFFLYSKLTVDKSRWQQGNVFSCSVMHEALHNHYTQKSLSLSPGK

SEQ ID NO: 498 - protein, 368 aa, Artificial Sequence
  Description of Artificial Sequence: Synthetic polypeptide
MDAMKRGLCCVLLLCGAVFVSPGASGRGEAETRECIYYNANWELERTNQSGLERCEGEQDKRLHCYASWRNSSRTIELVKKGCYLDDYNCYDRQECVATEENPQVYFCCCEGNFCNERFTHLPEAGGPEVTYEPPPTAPTGGGTHTCPPCPAPELLGGPSVFLFPPKPKDTLMISRTPEVTCVVVDVSHEDPEVKFNWYVDGVEVHNAKTKPREEQYNSTYRVVSVLTVLHQDWLNGKEYKCKVSNKALPAPIEKTISKAKGQPREPQVYTLPPSREEMTKNQVSLTCLVKGFYPSDIAVEWESNGQPENNYKTTPPVLDSDGSFFLYSKLTVDKSRWQQGNVFSCSVMHEALHNHYTQKSLSLSPGK

SEQ ID NO: 499 - DNA, 1104 bp, Artificial Sequence
  Description of Artificial Sequence: Synthetic polynucleotide
atggatgcaatgaagagagggctctgctgtgtgctgctgctgtgtggagcagtcttcgtttcgcccggcgcctctgggcgtggggaggctgagacacgggagtgcatctactacaacgccaactgggagctggagcgcaccaaccagagcggcctggagcgctgcgaaggcgagcaggacaagcggctgcactgctacgcctcctggcgcaacagctctcggaccatcgagctcgtgaagaagggctgctacctagatgactacaactgctacgataggcaggagtgtgtggccactgaggagaacccccaggtgtacttctgctgctgtgaaggcaacttctgcaacgagcgcttcactcatttgccagaggctgggggcccggaagtcacgtacgagccacccccgacagcccccaccggtggtggaactcacacatgcccaccgtgcccagcacctgaactcctggggggaccgtcagtcttcctcttccccccaaaacccaaggacaccctcatgatctcccggacccctgaggtcacatgcgtggtggtggacgtgagccacgaagaccctgaggtcaagttcaactggtacgtggacggcgtggaggtgcataatgccaagacaaagccgcgggaggagcagtacaacagcacgtaccgtgtggtcagcgtcctcaccgtcctgcaccaggactggctgaatggcaaggagtacaagtgcaaggtctccaacaaagccctcccagcccccatcgagaaaaccatctccaaagccaaagggcagccccgagaaccacaggtgtacaccctgcccccatcccgggaggagatgaccaagaaccaggtcagcctgacctgcctggtcaaaggcttctatcccagcgacatcgccgtggagtgggagagcaatgggcagccggagaacaactacaagaccacgcctcccgtgctggactccgacggctccttcttcctctatagcaagctcaccgtggacaagagcaggtggcagcaggggaacgtcttctcatgctccgtgatgcatgaggctctgcacaaccactacacgcagaagagcctctccctgtctccgggtaaa

SEQ ID NO: 500 - protein, 343 aa, Artificial Sequence
  Description of Artificial Sequence: Synthetic polypeptide
GRGEAETRECIYYNANWELERTNQSGLERCEGEQDKRLHCYASWRNSSRTIELVKKGCYLDDYNCYDRQECVATEENPQVYFCCCEGNFCNERFTHLPEAGGPEVTYEPPPTAPTGGGTHTCPPCPAPELLGGPSVFLFPPKPKDTLMISRTPEVTCVVVDVSHEDPEVKFNWYVDGVEVHNAKTKPREEQYNSTYRVVSVLTVLHQDWLNGKEYKCKVSNKALPAPIEKTISKAKGQPREPQVYTLPPSREEMTKNQVSLTCLVKGFYPSDIAVEWESNGQPENNYKTTPPVLDSDGSFFLYSKLTVDKSRWQQGNVFSCSVMHEALHNHYTQKSLSLSPGK

SEQ ID NO: 501 - protein, 368 aa, Artificial Sequence
  Description of Artificial Sequence: Synthetic polypeptide
MDAMKRGLCCVLLLCGAVFVSPGASGRGEAETRECIYYNANWELERTNQSGLERCEGEQDKRLHCYASWRNSSRTIELVKKGCWLDDSRCYDRQECVATEENPQVYFCCCEGNFCNERFTHLPEAGGPEVTYEPPPTAPTGGGTHTCPPCPAPELLGGPSVFLFPPKPKDTLMISRTPEVTCVVVDVSHEDPEVKFNWYVDGVEVHNAKTKPREEQYNSTYRVVSVLTVLHQDWLNGKEYKCKVSNKALPAPIEKTISKAKGQPREPQVYTLPPSREEMTKNQVSLTCLVKGFYPSDIAVEWESNGQPENNYKTTPPVLDSDGSFFLYSKLTVDKSRWQQGNVFSCSVMHEALHNHYTQKSLSLSPGK

SEQ ID NO: 502 - DNA, 1104 bp, Artificial Sequence
  Description of Artificial Sequence: Synthetic polynucleotide
atggatgcaatgaagagagggctctgctgtgtgctgctgctgtgtggagcagtcttcgtttcgcccggcgcctctgggcgtggggaggctgagacacgggagtgcatctactacaacgccaactgggagctggagcgcaccaaccagagcggcctggagcgctgcgaaggcgagcaggacaagcggctgcactgctacgcctcctggcgcaacagctctaggaccatcgagctcgtgaagaagggctgctggctagatgactcccgttgctacgataggcaggagtgtgtggccactgaggagaacccccaggtgtacttctgctgctgtgaaggcaacttctgcaacgagcgcttcactcatttgccagaggctgggggcccggaagtcacgtacgagccacccccgacagcccccaccggtggtggaactcacacatgcccaccgtgcccagcacctgaactcctggggggaccgtcagtcttcctcttccccccaaaacccaaggacaccctcatgatctcccggacccctgaggtcacatgcgtggtggtggacgtgagccacgaagaccctgaggtcaagttcaactggtacgtggacggcgtggaggtgcataatgccaagacaaagccgcgggaggagcagtacaacagcacgtaccgtgtggtcagcgtcctcaccgtcctgcaccaggactggctgaatggcaaggagtacaagtgcaaggtctccaacaaagccctcccagcccccatcgagaaaaccatctccaaagccaaagggcagccccgagaaccacaggtgtacaccctgcccccatcccgggaggagatgaccaagaaccaggtcagcctgacctgcctggtcaaaggcttctatcccagcgacatcgccgtggagtgggagagcaatgggcagccggagaacaactacaagaccacgcctcccgtgctggactccgacggctccttcttcctctatagcaagctcaccgtggacaagagcaggtggcagcaggggaacgtcttctcatgctccgtgatgcatgaggctctgcacaaccactacacgcagaagagcctctccctgtctccgggtaaa

SEQ ID NO: 503 - protein, 343 aa, Artificial Sequence
  Description of Artificial Sequence: Synthetic polypeptide
GRGEAETRECIYYNANWELERTNQSGLERCEGEQDKRLHCYASWRNSSRTIELVKKGCWLDDSRCYDRQECVATEENPQVYFCCCEGNFCNERFTHLPEAGGPEVTYEPPPTAPTGGGTHTCPPCPAPELLGGPSVFLFPPKPKDTLMISRTPEVTCVVVDVSHEDPEVKFNWYVDGVEVHNAKTKPREEQYNSTYRVVSVLTVLHQDWLNGKEYKCKVSNKALPAPIEKTISKAKGQPREPQVYTLPPSREEMTKNQVSLTCLVKGFYPSDIAVEWESNGQPENNYKTTPPVLDSDGSFFLYSKLTVDKSRWQQGNVFSCSVMHEALHNHYTQKSLSLSPGK

SEQ ID NO: 504 - protein, 368 aa, Artificial Sequence
  Description of Artificial Sequence: Synthetic polypeptide
MDAMKRGLCCVLLLCGAVFVSPGASGRGEAETRECIYYNANWELERTNQSGLERCEGNQDKRLHCYASWRNSSRTIELVKKGCWLDDYRCYDRQECVATEENPQVYFCCCEGNFCNERFTHLPEAGGPEVTYEPPPTAPTGGGTHTCPPCPAPELLGGPSVFLFPPKPKDTLMISRTPEVTCVVVDVSHEDPEVKFNWYVDGVEVHNAKTKPREEQYNSTYRVVSVLTVLHQDWLNGKEYKCKVSNKALPAPIEKTISKAKGQPREPQVYTLPPSREEMTKNQVSLTCLVKGFYPSDIAVEWESNGQPENNYKTTPPVLDSDGSFFLYSKLTVDKSRWQQGNVFSCSVMHEALHNHYTQKSLSLSPGK

SEQ ID NO: 505 - DNA, 1104 bp, Artificial Sequence
  Description of Artificial Sequence: Synthetic polynucleotide
atggatgcaatgaagagagggctctgctgtgtgctgctgctgtgtggagcagtcttcgtttcgcccggcgcctctgggcgtggggaggctgagacacgggagtgcatctactacaacgccaactgggagctggagcgcaccaaccagagcggcctggagcgctgcgaaggcaaccaggacaagcggctgcactgctacgcctcctggcgcaacagctctcggaccatcgagctcgtgaagaagggctgctggctagatgactaccggtgctacgataggcaggagtgtgtggccactgaggagaacccccaggtgtacttctgctgctgtgaaggcaacttctgcaacgagcgcttcactcatttgccagaggctgggggcccggaagtcacgtacgagccacccccgacagcccccaccggtggtggaactcacacatgcccaccgtgcccagcacctgaactcctggggggaccgtcagtcttcctcttccccccaaaacccaaggacaccctcatgatctcccggacccctgaggtcacatgcgtggtggtggacgtgagccacgaagaccctgaggtcaagttcaactggtacgtggacggcgtggaggtgcataatgccaagacaaagccgcgggaggagcagtacaacagcacgtaccgtgtggtcagcgtcctcaccgtcctgcaccaggactggctgaatggcaaggagtacaagtgcaaggtctccaacaaagccctcccagcccccatcgagaaaaccatctccaaagccaaagggcagccccgagaaccacaggtgtacaccctgcccccatcccgggaggagatgaccaagaaccaggtcagcctgacctgcctggtcaaaggcttctatcccagcgacatcgccgtggagtgggagagcaatgggcagccggagaacaactacaagaccacgcctcccgtgctggactccgacggctccttcttcctctatagcaagctcaccgtggacaagagcaggtggcagcaggggaacgtcttctcatgctccgtgatgcatgaggctctgcacaaccactacacgcagaagagcctctccctgtctccgggtaaa

SEQ ID NO: 506 - protein, 343 aa, Artificial Sequence
  Description of Artificial Sequence: Synthetic polypeptide
GRGEAETRECIYYNANWELERTNQSGLERCEGNQDKRLHCYASWRNSSRTIELVKKGCWLDDYRCYDRQECVATEENPQVYFCCCEGNFCNERFTHLPEAGGPEVTYEPPPTAPTGGGTHTCPPCPAPELLGGPSVFLFPPKPKDTLMISRTPEVTCVVVDVSHEDPEVKFNWYVDGVEVHNAKTKPREEQYNSTYRVVSVLTVLHQDWLNGKEYKCKVSNKALPAPIEKTISKAKGQPREPQVYTLPPSREEMTKNQVSLTCLVKGFYPSDIAVEWESNGQPENNYKTTPPVLDSDGSFFLYSKLTVDKSRWQQGNVFSCSVMHEALHNHYTQKSLSLSPGK

SEQ ID NO: 507 - protein, 368 aa, Artificial Sequence
  Description of Artificial Sequence: Synthetic polypeptide
MDAMKRGLCCVLLLCGAVFVSPGASGRGEAETRECIYYNANWELERTNQSGLERCEGEQDKRLHCYASWRNSSRTIELVKKGCWEDDTRCYDRQECVATEENPQVYFCCCEGNFCNERFTHLPEAGGPEVTYEPPPTAPTGGGTHTCPPCPAPELLGGPSVFLFPPKPKDTLMISRTPEVTCVVVDVSHEDPEVKFNWYVDGVEVHNAKTKPREEQYNSTYRVVSVLTVLHQDWLNGKEYKCKVSNKALPAPIEKTISKAKGQPREPQVYTLPPSREEMTKNQVSLTCLVKGFYPSDIAVEWESNGQPENNYKTTPPVLDSDGSFFLYSKLTVDKSRWQQGNVFSCSVMHEALHNHYTQKSLSLSPGK

SEQ ID NO: 508 - DNA, 1104 bp, Artificial Sequence
  Description of Artificial Sequence: Synthetic polynucleotide
atggatgcaatgaagagagggctctgctgtgtgctgctgctgtgtggagcagtcttcgtttcgcccggcgcctctgggcgtggggaggctgagacacgggagtgcatctactacaacgccaactgggagctggagcgcaccaaccagagcggcctggagcgctgcgaaggcgagcaggacaagcggctgcactgctacgcctcctggcgcaacagctctaggaccatcgagctcgtgaagaagggctgctgggaggatgacacccgttgctacgataggcaggagtgtgtggccactgaggagaacccccaggtgtacttctgctgctgtgaaggcaacttctgcaacgagcgcttcactcatttgccagaggctgggggcccggaagtcacgtacgagccacccccgacagcccccaccggtggtggaactcacacatgcccaccgtgcccagcacctgaactcctggggggaccgtcagtcttcctcttccccccaaaacccaaggacaccctcatgatctcccggacccctgaggtcacatgcgtggtggtggacgtgagccacgaagaccctgaggtcaagttcaactggtacgtggacggcgtggaggtgcataatgccaagacaaagccgcgggaggagcagtacaacagcacgtaccgtgtggtcagcgtcctcaccgtcctgcaccaggactggctgaatggcaaggagtacaagtgcaaggtctccaacaaagccctcccagcccccatcgagaaaaccatctccaaagccaaagggcagccccgagaaccacaggtgtacaccctgcccccatcccgggaggagatgaccaagaaccaggtcagcctgacctgcctggtcaaaggcttctatcccagcgacatcgccgtggagtgggagagcaatgggcagccggagaacaactacaagaccacgcctcccgtgctggactccgacggctccttcttcctctatagcaagctcaccgtggacaagagcaggtggcagcaggggaacgtcttctcatgctccgtgatgcatgaggctctgcacaaccactacacgcagaagagcctctccctgtctccgggtaaa

SEQ ID NO: 509 - protein, 343 aa, Artificial Sequence
  Description of Artificial Sequence: Synthetic polypeptide
GRGEAETRECIYYNANWELERTNQSGLERCEGEQDKRLHCYASWRNSSRTIELVKKGCWEDDTRCYDRQECVATEENPQVYFCCCEGNFCNERFTHLPEAGGPEVTYEPPPTAPTGGGTHTCPPCPAPELLGGPSVFLFPPKPKDTLMISRTPEVTCVVVDVSHEDPEVKFNWYVDGVEVHNAKTKPREEQYNSTYRVVSVLTVLHQDWLNGKEYKCKVSNKALPAPIEKTISKAKGQPREPQVYTLPPSREEMTKNQVSLTCLVKGFYPSDIAVEWESNGQPENNYKTTPPVLDSDGSFFLYSKLTVDKSRWQQGNVFSCSVMHEALHNHYTQKSLSLSPGK

SEQ ID NO: 510 - protein, 368 aa, Artificial Sequence
  Description of Artificial Sequence: Synthetic polypeptide
MDAMKRGLCCVLLLCGAVFVSPGASGRGEAETRECIYYNANWELERTNQSGLERCEGEQDKRLHCYASWRNSSRTIELVKKGCWEDDYRCYDRQECVATEENPQVYFCCCEGNFCNERFTHLPEAGGPEVTYEPPPTAPTGGGTHTCPPCPAPELLGGPSVFLFPPKPKDTLMISRTPEVTCVVVDVSHEDPEVKFNWYVDGVEVHNAKTKPREEQYNSTYRVVSVLTVLHQDWLNGKEYKCKVSNKALPAPIEKTISKAKGQPREPQVYTLPPSREEMTKNQVSLTCLVKGFYPSDIAVEWESNGQPENNYKTTPPVLDSDGSFFLYSKLTVDKSRWQQGNVFSCSVMHEALHNHYTQKSLSLSPGK

SEQ ID NO: 511 - DNA, 1104 bp, Artificial Sequence
  Description of Artificial Sequence: Synthetic polynucleotide
atggatgcaatgaagagagggctctgctgtgtgctgctgctgtgtggagcagtcttcgtttcgcccggcgcctctgggcgtggggaggctgagacacgggagtgcatctactacaacgccaactgggagctggagcgcaccaaccagagcggcctggagcgctgcgaaggcgagcaggacaagcggctgcactgctacgcctcctggcgcaacagctctcggaccatcgagctcgtgaagaagggctgctgggaagatgactaccggtgctacgataggcaggagtgtgtggccactgaggagaacccccaggtgtacttctgctgctgtgaaggcaacttctgcaacgagcgcttcactcatttgccagaggctgggggcccggaagtcacgtacgagccacccccgacagcccccaccggtggtggaactcacacatgcccaccgtgcccagcacctgaactcctggggggaccgtcagtcttcctcttccccccaaaacccaaggacaccctcatgatctcccggacccctgaggtcacatgcgtggtggtggacgtgagccacgaagaccctgaggtcaagttcaactggtacgtggacggcgtggaggtgcataatgccaagacaaagccgcgggaggagcagtacaacagcacgtaccgtgtggtcagcgtcctcaccgtcctgcaccaggactggctgaatggcaaggagtacaagtgcaaggtctccaacaaagccctcccagcccccatcgagaaaaccatctccaaagccaaagggcagccccgagaaccacaggtgtacaccctgcccccatcccgggaggagatgaccaagaaccaggtcagcctgacctgcctggtcaaaggcttctatcccagcgacatcgccgtggagtgggagagcaatgggcagccggagaacaactacaagaccacgcctcccgtgctggactccgacggctccttcttcctctatagcaagctcaccgtggacaagagcaggtggcagcaggggaacgtcttctcatgctccgtgatgcatgaggctctgcacaaccactacacgcagaagagcctctccctgtctccgggtaaa

SEQ ID NO: 512 - protein, 343 aa, Artificial Sequence
  Description of Artificial Sequence: Synthetic polypeptide
GRGEAETRECIYYNANWELERTNQSGLERCEGEQDKRLHCYASWRNSSRTIELVKKGCWEDDYRCYDRQECVATEENPQVYFCCCEGNFCNERFTHLPEAGGPEVTYEPPPTAPTGGGTHTCPPCPAPELLGGPSVFLFPPKPKDTLMISRTPEVTCVVVDVSHEDPEVKFNWYVDGVEVHNAKTKPREEQYNSTYRVVSVLTVLHQDWLNGKEYKCKVSNKALPAPIEKTISKAKGQPREPQVYTLPPSREEMTKNQVSLTCLVKGFYPSDIAVEWESNGQPENNYKTTPPVLDSDGSFFLYSKLTVDKSRWQQGNVFSCSVMHEALHNHYTQKSLSLSPGK

SEQ ID NO: 513 - protein, 368 aa, Artificial Sequence
  Description of Artificial Sequence: Synthetic polypeptide
MDAMKRGLCCVLLLCGAVFVSPGASGRGEAETRECIYYNANWELERTNQSGLERCEGEQDKRLHCYASWRNSSRTIELVKKGCWTDDTRCYDRQECVATEENPQVYFCCCEGNFCNERFTHLPEAGGPEVTYEPPPTAPTGGGTHTCPPCPAPELLGGPSVFLFPPKPKDTLMISRTPEVTCVVVDVSHEDPEVKFNWYVDGVEVHNAKTKPREEQYNSTYRVVSVLTVLHQDWLNGKEYKCKVSNKALPAPIEKTISKAKGQPREPQVYTLPPSREEMTKNQVSLTCLVKGFYPSDIAVEWESNGQPENNYKTTPPVLDSDGSFFLYSKLTVDKSRWQQGNVFSCSVMHEALHNHYTQKSLSLSPGK

SEQ ID NO: 514 - DNA, 1104 bp, Artificial Sequence
  Description of Artificial Sequence: Synthetic polynucleotide
atggatgcaatgaagagagggctctgctgtgtgctgctgctgtgtggagcagtcttcgtttcgcccggcgcctctgggcgtggggaggctgagacacgggagtgcatctactacaacgccaactgggagctggagcgcaccaaccagagcggcctggagcgctgcgaaggcgagcaggacaagcggctgcactgctacgcctcctggcgcaacagctctcggaccatcgagctcgtgaagaagggctgctggaccgatgacacccggtgctacgataggcaggagtgtgtggccactgaggagaacccccaggtgtacttctgctgctgtgaaggcaacttctgcaacgagcgcttcactcatttgccagaggctgggggcccggaagtcacgtacgagccacccccgacagcccccaccggtggtggaactcacacatgcccaccgtgcccagcacctgaactcctggggggaccgtcagtcttcctcttccccccaaaacccaaggacaccctcatgatctcccggacccctgaggtcacatgcgtggtggtggacgtgagccacgaagaccctgaggtcaagttcaactggtacgtggacggcgtggaggtgcataatgccaagacaaagccgcgggaggagcagtacaacagcacgtaccgtgtggtcagcgtcctcaccgtcctgcaccaggactggctgaatggcaaggagtacaagtgcaaggtctccaacaaagccctcccagcccccatcgagaaaaccatctccaaagccaaagggcagccccgagaaccacaggtgtacaccctgcccccatcccgggaggagatgaccaagaaccaggtcagcctgacctgcctggtcaaaggcttctatcccagcgacatcgccgtggagtgggagagcaatgggcagccggagaacaactacaagaccacgcctcccgtgctggactccgacggctccttcttcctctatagcaagctcaccgtggacaagagcaggtggcagcaggggaacgtcttctcatgctccgtgatgcatgaggctctgcacaaccactacacgcagaagagcctctccctgtctccgggtaaa

SEQ ID NO: 515 - protein, 343 aa, Artificial Sequence
  Description of Artificial Sequence: Synthetic polypeptide
GRGEAETRECIYYNANWELERTNQSGLERCEGEQDKRLHCYASWRNSSRTIELVKKGCWTDDTRCYDRQECVATEENPQVYFCCCEGNFCNERFTHLPEAGGPEVTYEPPPTAPTGGGTHTCPPCPAPELLGGPSVFLFPPKPKDTLMISRTPEVTCVVVDVSHEDPEVKFNWYVDGVEVHNAKTKPREEQYNSTYRVVSVLTVLHQDWLNGKEYKCKVSNKALPAPIEKTISKAKGQPREPQVYTLPPSREEMTKNQVSLTCLVKGFYPSDIAVEWESNGQPENNYKTTPPVLDSDGSFFLYSKLTVDKSRWQQGNVFSCSVMHEALHNHYTQKSLSLSPGK

SEQ ID NO: 516-518 - skipped (3 entries)

SEQ ID NO: 519 - protein, 343 aa, Artificial Sequence
  Description of Artificial Sequence: Synthetic polypeptide
GRGEAETRECIYYNANWELERTNQSGLERCEGEQDKRLHCYASWRNSSGTIELVKKGCWLDDFNCYDRQECVATEENPQVYFCCCEGNFCNERFTHLPEAGGPEVTYEPPPTAPTGGGTHTCPPCPAPELLGGPSVFLFPPKPKDTLMISRTPEVTCVVVDVSHEDPEVKFNWYVDGVEVHNAKTKPREEQYNSTYRVVSVLTVLHQDWLNGKEYKCKVSNKALPVPIEKTISKAKGQPREPQVYTLPPSREEMTKNQVSLTCLVKGFYPSDIAVEWESNGQPENNYKTTPPVLDSDGSFFLYSKLTVDKSRWQQGNVFSCSVMHEALHNHYTQKSLSLSPGK

SEQ ID NO: 520 - protein, 368 aa, Artificial Sequence
  Description of Artificial Sequence: Synthetic polypeptide
MDAMKRGLCCVLLLCGAVFVSPGASGRGEAETRECIYYNANWELERTNQSGLERCEGEQDKRLHCYASWRNSSGTIELVKKGCWLDDFNCYDRQECVATEENPQVYFCCCEGNFCNERFTHLPEAGGPEVTYEPPPTAPTGGGTHTCPPCPAPELLGGPSVFLFPPKPKDTLMISRTPEVTCVVVDVSHEDPEVKFNWYVDGVEVHNAKTKPREEQYNSTYRVVSVLTVLHQDWLNGKEYKCKVSNKALPVPIEKTISKAKGQPREPQVYTLPPSREEMTKNQVSLTCLVKGFYPSDIAVEWESNGQPENNYKTTPPVLDSDGSFFLYSKLTVDKSRWQQGNVFSCSVMHEALHNHYTQKSLSLSPGK

SEQ ID NO: 521 - DNA, 1107 bp, Artificial Sequence
  Description of Artificial Sequence: Synthetic polynucleotide
atggatgcaatgaagagagggctctgctgtgtgctgctgctgtgtggagcagtcttcgtttcgcccggcgcctctgggcgtggggaggctgagacacgggagtgcatctactacaacgccaactgggagctggagcgcaccaaccagagcggcctggagcgctgcgaaggcgagcaggacaagcggctgcactgctacgcctcctggcgcaacagctctggcaccatcgagctcgtgaagaagggctgctggctagatgacttcaactgctacgataggcaggagtgtgtggccactgaggagaacccccaggtgtacttctgctgctgtgaaggcaacttctgcaacgagcgcttcactcatttgccagaggctgggggcccggaagtcacgtacgagccacccccgacagcccccaccggtggtggaactcacacatgcccaccgtgcccagcacctgaactcctggggggaccgtcagtcttcctcttccccccaaaacccaaggacaccctcatgatctcccggacccctgaggtcacatgcgtggtggtggacgtgagccacgaagaccctgaggtcaagttcaactggtacgtggacggcgtggaggtgcataatgccaagacaaagccgcgggaggagcagtacaacagcacgtaccgtgtggtcagcgtcctcaccgtcctgcaccaggactggctgaatggcaaggagtacaagtgcaaggtctccaacaaagccctcccagtccccatcgagaaaaccatctccaaagccaaagggcagccccgagaaccacaggtgtacaccctgcccccatcccgggaggagatgaccaagaaccaggtcagcctgacctgcctggtcaaaggcttctatcccagcgacatcgccgtggagtgggagagcaatgggcagccggagaacaactacaagaccacgcctcccgtgctggactccgacggctccttcttcctctatagcaagctcaccgtggacaagagcaggtggcagcaggggaacgtcttctcatgctccgtgatgcatgaggctctgcacaaccactacacgcagaagagcctctccctgtctccgggtaaatga

SEQ ID NO: 522 - protein, 368 aa, Artificial Sequence
  Description of Artificial Sequence: Synthetic polypeptide
MDAMKRGLCCVLLLCGAVFVSPGASGRGEAETRECIYYNANWELERTNQSGLERCEGEQDKRLHCYASWRNSSGTIELVKKGCWLDDKNCYDRQECVATEENPQVYFCCCEGNFCNERFTHLPEAGGPEVTYEPPPTAPTGGGTHTCPPCPAPEAAGGPSVFLFPPKPKDTLMISRTPEVTCVVVDVSHEDPEVKFNWYVDGVEVHNAKTKPREEQYNSTYRVVSVLTVLHQDWLNGKEYKCKVSNKALPAPIEKTISKAKGQPREPQVYTLPPSREEMTKNQVSLTCLVKGFYPSDIAVEWESNGQPENNYKTTPPVLDSDGSFFLYSKLTVDKSRWQQGNVFSCSVMHEALHNHYTQKSLSLSPGK

SEQ ID NO: 523 - DNA, 1104 bp, Artificial Sequence
  Description of Artificial Sequence: Synthetic polynucleotide
atggatgcaatgaagagagggctctgctgtgtgctgctgctgtgtggagcagtcttcgtttcgcccggcgcctctgggcgtggggaggctgagacacgggagtgcatctactacaacgccaactgggagctggagcgcaccaaccagagcggcctggagcgctgcgaaggcgagcaggacaagcggctgcactgctacgcctcctggcgcaacagctctggcaccatcgagctcgtgaagaagggctgctggctagatgacaagaactgctacgataggcaggagtgtgtggccactgaggagaacccccaggtgtacttctgctgctgtgaaggcaacttctgcaacgagcgcttcactcatttgccagaggctgggggcccggaagtcacgtacgagccacccccgacagcccccaccggtggtggaactcacacatgcccaccgtgcccagcacctgaagccgctgggggaccgtcagtcttcctcttccccccaaaacccaaggacaccctcatgatctcccggacccctgaggtcacatgcgtggtggtggacgtgagccacgaagaccctgaggtcaagttcaactggtacgtggacggcgtggaggtgcataatgccaagacaaagccgcgggaggagcagtacaacagcacgtaccgtgtggtcagcgtcctcaccgtcctgcaccaggactggctgaatggcaaggagtacaagtgcaaggtctccaacaaagccctcccagcccccatcgagaaaaccatctccaaagccaaagggcagccccgagaaccacaggtgtacaccctgcccccatcccgggaggagatgaccaagaaccaggtcagcctgacctgcctggtcaaaggcttctatcccagcgacatcgccgtggagtgggagagcaatgggcagccggagaacaactacaagaccacgcctcccgtgctggactccgacggctccttcttcctctatagcaagctcaccgtggacaagagcaggtggcagcaggggaacgtcttctcatgctccgtgatgcatgaggctctgcacaaccactacacgcagaagagcctctccctgtccccgggttga

SEQ ID NO: 524 - protein, 343 aa, Artificial Sequence
  Description of Artificial Sequence: Synthetic polypeptide
GRGEAETRECIYYNANWELERTNQSGLERCEGEQDKRLHCYASWRNSSGTIELVKKGCWLDDKNCYDRQECVATEENPQVYFCCCEGNFCNERFTHLPEAGGPEVTYEPPPTAPTGGGTHTCPPCPAPEAAGGPSVFLFPPKPKDTLMISRTPEVTCVVVDVSHEDPEVKFNWYVDGVEVHNAKTKPREEQYNSTYRVVSVLTVLHQDWLNGKEYKCKVSNKALPAPIEKTISKAKGQPREPQVYTLPPSREEMTKNQVSLTCLVKGFYPSDIAVEWESNGQPENNYKTTPPVLDSDGSFFLYSKLTVDKSRWQQGNVFSCSVMHEALHNHYTQKSLSLSPGK

SEQ ID NO: 525 - protein, 6 aa, Artificial Sequence
  Description of Artificial Sequence: Synthetic 6xHis tag
HHHHHH

SEQ ID NO: 526 - protein, 20 aa, Artificial Sequence
  Description of Artificial Sequence: Synthetic peptide
  SITE (1)..(20): This sequence may encompass 1-4 "Gly Gly Gly Gly Ser" repeating units
GGGGSGGGGSGGGGSGGGGS

SEQ ID NO: 527 - protein, 10 aa, Artificial Sequence
  Description of Artificial Sequence: Synthetic peptide
  MOD_RES (1)..(1): Any amino acid
  MOD_RES (3)..(3): Any amino acid
  MOD_RES (5)..(5): Any amino acid
  MOD_RES (7)..(7): Any amino acid
  MOD_RES (9)..(9): Any amino acid
  SITE (1)..(10): This sequence may encompass 1-5 "Xaa Pro" repeating units
  See specification as filed for detailed description of substitutions and preferred embodiments
XPXPXPXPXP

SEQ ID NO: 528 - DNA, 48 bp, Artificial Sequence
  Description of Artificial Sequence: Synthetic oligonucleotide
cagacagacagacagacagacagacagacagacagacagacagacaga
